(19) United States
(12) Patent Application Publication
(10) Pub. No.: US 2022/0298522 A1
(43) Pub. Date: Sep. 22, 2022

(54) METHODS OF CONTROLLING CANNABINOID SYNTHESIS IN PLANTS OR CELLS AND PLANTS AND CELLS PRODUCED THEREBY

(71) Applicant: The State of Israel, Ministry of Agriculture & Rural Development, Agricultural Research Organization, Rishon-LeZion (IL)

(72) Inventors: Moshe Arie FLAISHMAN, Herzliya (IL); Hadas SHAFRAN-TOMER, Rehovot (IL); Reut COHEN PEER, Kiryat-Ono (IL); Oded COHEN, Nir Zvi (IL)

(73) Assignee: The State of Israel, Ministry of Agriculture & Rural Development, Agricultural Research Organization, Rishon-LeZion (IL)

(21) Appl. No.: 17/631,510

(22) PCT Filed: Jul. 29, 2020
(86) PCT No.: PCT/IL2020/050835

§ 371 Date: Jan. 31, 2022

Related U.S. Application Data
(60) Provisional application No. 62/880,136, filed on Jul. 30, 2019.

(51) Int. Cl. C12N 15/82; C07K 14/415

(52) U.S. Cl. CPC C12N 15/8243; C07K 14/415

(57) ABSTRACT

A method of controlling cannabinoid synthesis in a cell or plant or plant part comprising same is provided. The method comprising modulating expression in the cell of at least one polypeptide comprising an amino acid sequence at least 95% identical to SEQ ID NO: 1-15 and 18-86, the polypeptide modulating cannabinoid synthesis, thereby controlling cannabinoid synthesis in the cell. Also provided are methods of producing cannabinoids and selecting plants producing cannabinoids of interest.

### RELATED APPLICATION/S

[0001] This application claims the benefit of priority from U.S. Provisional Patent Application No. 62/880,136 filed Jul. 30, 2019 which is hereby incorporated by reference.

### SEQUENCE LISTING STATEMENT

[0002] The ASCII file, entitled 83866 SequenceListing.txt, created on 28 Jul. 2020, comprising 700,416 bytes, submitted concurrently with the filing of this application is incorporated herein by reference.

### FIELD AND BACKGROUND OF THE INVENTION

[0003] The present invention, in some embodiments thereof, relates to methods of controlling cannabinoid synthesis in plants or cells and plants and cells produced thereby.

[0004] Cannabis sativa is an annual flowering plant from Cannabaceae family. It is also known by other names, such as cannabis, marijuana, ganja and hemp. This plant has been used for industrial, medicinal and recreational. The plant Cannabis sativa contains a number of chemical compounds termed cannabinoids, which are known by their pharmaceutical potential. Recently, the usage of Cannabis for medicinal purposes has been legalized in many countries (Volkow, et al., 2017).

[0005] Recent findings suggest that different phytocannabinoids exhibit diverse pharmacological and biological activities, acting on multiple targets. Russo (2011) supports this assumption by stating that phytocannabinoids and combinations of cannabinoids can, in certain situations, be more effective than Δ9-THC or CBD alone.

[0006] Thus, today's research is focused on different cannabinoids in combination with other Cannabis-derived compounds and their effect on the treatment of various diseases. Cannabis's value and potential is changing all over the world. Patients, physicians, and governmental bodies are giving increased attention to medical Cannabis. In the past ten years, there has been a rapid growth in the discovery and use of Cannabis-based extracts for various therapeutic and medical purposes. The number of people worldwide that are currently using physician-prescribed medical Cannabis is estimated at millions. According to the ProCon organization, in the U.S. alone, as of 2018, this number was over 2.1 million patients.

[0007] Phytocannabinoids are terpenophenolic compounds associated with the effects of the Cannabis plant and mimic the effects of endogenous cannabinoids. These phytocannabinoids are biosynthesized and secreted by glandular trichomes found on the flower tops of the Cannabis plant. In the 1960s several cannabinoids were discovered, including cannabigerol (CBG), tetracannabivarin (THCV), and cannabichromene (CBC). Currently 144 have been isolated. C. sativa contains phytocannabinoids, chemical compounds that can be classified into 11 types: cannabidiol (CBD), cannabinol (CBN), cannabinodiol (CBDN), cannabichromene (CBC), cannabigerol (CBG), cannabicyclol (CBL), cannabielsoin (CBE), cannabitriol (CBT), A9 tetrahydrocannabinol (Δ9-THC), and Δ8-tetrahydrocannabinol (Δ8-THC) and miscellaneous types (Hanuš, et al., 2016). Phytocannabinoids are biosynthesized as acids. In general, CBG, Δ9-THC, CBD and CBC phytocannabinoid subclasses are biosynthesized in Cannabis plants, while the remaining six subclasses are probably the result of decomposition either in the plant or due to poor storage conditions following harvest. All subclasses of phytocannabinoids derive initially from CBG-type ones, and therefore bear similarity in terms of chemical. trans-Δ9-tetrahydrocannabinolic acid (Δ9-THCA), cannabidiolic acid (CBDA), and cannabichromenic acid (CBCA) differ only by the enzymatic cyclization of the terpene moiety (Kinghorn, et al., 2017).

[0008] Cannabis strains significantly vary in their chemical compositions. The concentration of Cannabis's compounds depends on the plant's tissue-type, age, variety, growth conditions (nutrition, humidity and light levels), harvest time, and storage conditions. Generally, marijuana has high amount of Δ9-tetrahydrocannabinol (Δ9-THC) and low amount of cannabidiol (CBD). Hemp or industrial hemp, contains high amount of CBD and very low in Δ9-THC. Analyzing the chemical content of the plants is of major importance considering that the concentrations of these constituents and their interplay may determine medicinal effects and adverse side effects. Major and minor phytocannabinoids can have remarkably positive effects in mammalian behavior related to anxiety and drug acquisition and may offer novel drug abuse treatment options. The ratios of these major and minor compounds can vary greatly and some compounds are not often detected or tested for or reported. Turner et al. (2017) and Morales et al. (2017), suggested that the relative proportions of each phytocannabinoid type will additionally influence the pharmacological effects of whole Cannabis extracts, either through a polypharmacological effect of the phytocannabinoids themselves, or through modulation of phytocannabinoid effects by the non-cannabinoid content of the plant since they act on multiple targets.

### SUMMARY OF THE INVENTION

[0009] According to an aspect of some embodiments of the present invention there is provided a method of controlling cannabinoid synthesis in a cell or plant or plant part comprising same, the method comprising modulating expression in the cell of at least one polypeptide comprising an amino acid sequence at least 95% identical to SEQ ID NO: 1-15 and 18-86, the polypeptide modulating cannabinoid synthesis, thereby controlling cannabinoid synthesis in the cell.

[0010] According to an aspect of some embodiments of the present invention there is provided a method of producing cannabinoids in a plant, the method comprising modulating expression in the plant of at least one polypeptide comprising an amino acid sequence at least 95% identical to SEQ ID NO: 1-15 and 18-86 the polypeptide modulating cannabinoid synthesis, thereby producing cannabinoids in the cell.

[0011] According to an aspect of some embodiments of the present invention there is provided a method of selecting a plant for a cannabinoid profile, the method comprising analyzing in the plant or part thereof presence of a nucleic acid sequence at least 95% identical to SEQ ID NO: 91-180 or amino acid sequence at least 95% identical to SEQ ID NO: 1-15 and 18-86, wherein presence or absence of the nucleic acid sequence or amino acid sequence is indicative of the cannabinoid profile.

[0012] According to some embodiments of the invention, the method further comprises determining a cannabinoid or cannabinoid profile of the plant or part thereof.

[0013] According to some embodiments of the invention, the method further comprises recovering the cannabinoids from the plant or cell.

[0014] According to some embodiments of the invention, the recovering is by extraction and/or fractionation.

[0015] According to an aspect of some embodiments of the present invention there is provided a nucleic acid construct comprising a nucleic acid sequence encoding a polypeptide at least 95% identical to SEQ ID NO: 1-15 and 18-86, the polypeptide modulating cannabinoid synthesis, and another nucleic acid sequence comprising a cis-acting regulatory region heterologous to the nucleic acid sequence and capable of regulating expression of the polypeptide.

[0016] According to an aspect of some embodiments of the present invention there is provided a cell, a plant, or part thereof having being genetically modified to express a polypeptide comprising an amino acid sequence at least 95% identical to SEQ ID NO: 1-15 and 18-86, the polypeptide modulating cannabinoid synthesis.

[0017] According to an aspect of some embodiments of the present invention there is provided a cell, a plant, or part thereof having being genetically modified to down-regulate expression of a polypeptide comprising an amino acid sequence at least 95% identical to SEQ ID NO: 1-15 and 18-86.

[0018] According to some embodiments of the invention, the cell, plant or part thereof of is a transgenic plant or plant cell.

[0019] According to some embodiments of the invention, the cell, plant or part thereof of claim 8 or 9 being a non-transgenic plant or plant cell.

[0020] According to some embodiments of the invention, the modulating is by genome editing.

[0021] According to some embodiments of the invention, the modulating is by transgenesis.

[0022] According to some embodiments of the invention, the modulating is by breeding.

[0023] According to some embodiments of the invention, the modulating comprises upregulating expression.

[0024] According to some embodiments of the invention, the modulating comprises downregulating expression.

[0025] According to some embodiments of the invention, the cell is yeast.

[0026] According to some embodiments of the invention, the method further comprises supplementing the cell with at least one cannabinoid or precursor thereof and/or enzyme modulating cannabinoid synthesis.

[0027] According to some embodiments of the invention, the cell is a plant cell.

[0028] According to some embodiments of the invention, the plant part is a flower.

[0029] According to some embodiments of the invention, the plant part is a seed.

[0030] According to some embodiments of the invention, the plant part is a root.

[0031] Unless otherwise defined, all technical and/or scientific terms used herein have the same meaning as commonly understood by one of ordinary skill in the art to which the invention pertains. Although methods and materials similar or equivalent to those described herein can be used in the practice or testing of embodiments of the invention, exemplary methods and/or materials are described below. In case of conflict, the patent specification, including definitions, will control. In addition, the materials, methods, and examples are illustrative only and are not intended to be necessarily limiting.

### BRIEF DESCRIPTION OF THE SEVERAL VIEWS OF THE DRAWING(S)

[0032] Some embodiments of the invention are herein described, by way of example only, with reference to the accompanying drawings. With specific reference now to the drawings in detail, it is stressed that the particulars shown are by way of example and for purposes of illustrative discussion of embodiments of the invention. In this regard, the description taken with the drawings makes apparent to those skilled in the art how embodiments of the invention may be practiced.

[0033] In the drawings:

[0034] FIG. 1 is a diagram showing a phylogenetic analysis of the three Cannabis genomes comped to THCA synthase (THCAS), CBDA synthase (CBDAS), CBCA synthase (CBCAS) and CBGA synthase (CBGAS)-like genes. All 8 groups of newly discovered genes are depicted here.

[0035] FIG. 2 is a Table showing Gene expression profiles taken from cannabis PK plant tissue at different developmental stages: a heat map shows the relative expression values (log 2 RPKM) of the cannabinoids synthase candidate genes, in PK plant tissue.

[0036] FIG. 3 is a diagram showing a phylogenetic tree of CBCAS like genes (group I) according to some embodiments of the invention;

[0037] FIG. 4 is an illustration demonstrating elements common to promoters in group I (CBCAS like genes): CCAF (Circadian clock associated), DREB (a-biotic stress element), EINL (Ethylen insensitive 3 like factors), GAPB (GAP-Box (light response elements)), HEAT (Heat shock factors), IBOX (light regulation), STKM (Storekeeper motif), TOEF (Target of early activation tagged factors-AP2 domain).

[0038] FIG. 5 is a graphic display of the sequence similarity (DNA and Protein), in the group II (THCAS-like genes). Display by AlignX of vector NTi software.

[0039] FIG. 6 is an illustration demonstrating elements common to promoters in the group: CCAF (Circadian clock associated), HEAT (Heat shock factors), IBOX (light regulation).

[0040] FIG. 7 is a diagram showing a phylogenetic tree of group 3. The phylogenetic tree assembly using Vector NTi, AlignX default.

[0041] FIGS. 8A-B show promoter analysis demonstrating all element common to all sequences in the third group. FIG. 8A—upper branches showing CCAF (Circadian clock associated), HEAT (Heat shock factors), IBOX (light regulation). FIG. 8B—the lower group, show CCAF (Circadian clock associated), EINL (Ethylen insensitive 3 like factors), HEAT (Heat shock factors), IBOX (light regulation), LREM (Light responsive element motif), and TOEF (Target of early activation tagged factors-AP2 domain).

[0042] FIG. 9 is a diagram showing phylogenetic analysis of group 4 (CBDAS like genes).

[0043] FIG. 10 shows promoter analysis demonstrating elements common to all sequences in group 4: CCAF (Circadian clock associated), DREB (a-biotic stress element), HEAT (Heat shock factors), IBOX (light regulation).

[0044] FIG. 11 is a diagram showing phylogenetic analysis of group 5 (CBGAS like genes).

[0045] FIG. 12 is an illustration showing promoter analysis demonstrating elements common to all sequences in group 5: CCAF (Circadian clock associated), GAPB (GAP-Box (light response elements), HEAT (Heat shock factors), IBOX (light regulation), LREM, TOEF (Target of early activation tagged factors-AP2 domain).

[0046] FIG. 13 is an illustration showing promoter analysis demonstrating elements in group 6: CCAF (Circadian clock associated), CE1F, DREB (a-biotic stress element), EINL (Ethylen insensitive 3 like factors), GAPB (GAP-Box (light response elements)), HEAT (Heat shock factors), IBOX (light regulation), LREM, TOEF (Target of early activation tagged factors-AP2 domain).

[0047] FIG. 14 is a diagram showing phylogenetic analysis of group 7.

[0048] FIG. 15 is an illustration of promoter analysis demonstrating elements common to all sequences in group 7: CCAF (Circadian clock associated), GAPB (GAP-Box (light response elements)), HEAT (Heat shock factors), IBOX (light regulation), STKM (Storekeeper motif).

[0049] FIG. 16 is a diagram showing phylogenetic analysis of group 8.

[0050] FIG. 17 is an illustration of promoter analysis demonstrating all element common to all sequences in group 8: GAPB (GAP-Box (light response elements)), HEAT (Heat shock factors) and TOEF (Target of early activation tagged factors-AP2 domain).

[0051] FIGS. 18A-B are schemes of pK7WG2 plasmid constructs for over expressed THC synthase (FIG. 18A) and CBD synthase (FIG. 18B) genes.

[0052] FIGS. 19A-E are images of Agrobacterium mediated transformation in callus cultures of C. sativa (#201). Leaf explants were collected from the proliferated shoots of C. sativa (FIG. 19A), which formed a callus after 1 week of incubation on CRF medium (FIG. 19B); with a substantial callus growth after 1 month (FIG. 19C) that showed GUS positive results after 3 days (FIG. 19D) as transient and 10 days (FIG. 19E).

[0053] FIGS. 20A-B are images showing GUS overexpression (FIG. 20A) and PCR analysis (FIG. 20B) of callus cultures of C. sativa (#201) 30 days after transformation.

[0054] FIGS. 21A-B are graphs showing over expression of THCAS (FIG. 21A) or CBDAS (FIG. 21B) in callus cultures of C. sativa. W.T.=WILD TYPE; O.E.=Over expression transgenic callus.

### DESCRIPTION OF SPECIFIC EMBODIMENTS OF THE INVENTION

[0055] The present invention, in some embodiments thereof, relates to methods of controlling cannabinoid synthesis in plants or cells and plants and cells produced thereby.

[0056] Before explaining at least one embodiment of the invention in detail, it is to be understood that the invention is not necessarily limited in its application to the details set forth in the following description or exemplified by the Examples. The invention is capable of other embodiments or of being practiced or carried out in various ways.

[0057] In order to identify genes associated with cannabinoid synthesis, the present inventors combined DNA sequencing and expression data analysis. The present inventors applied bioinformatics tools to in silico identify genes showing homology to the phytocannabinoid subclasses CBG, Δ9-THC, CBD and CBC phytocannabinoid. Gene expression profiling of the newly identified genes was performed in cannabis plant tissues at different developmental stages. In addition the DNA promoter region that initiates transcription of each gene was identified and the type of binding sites found in the DNA of each gene was characterized.

[0058] Hence the identification of novel genes associated with phytocannabinoid synthesis can be used in regulating the phytocannabionoid profile in plants and in selection of such plants.

[0059] Thus, according to an aspect of the invention there is provided a method of controlling cannabinoid synthesis in a cell or plant or plant part comprising same, the method comprising modulating expression in the cell of at least one polypeptide comprising an amino acid sequence at least 95% identical to SEQ ID NO: 1-15 and 18-86, the polypeptide modulating cannabinoid synthesis, thereby controlling cannabinoid synthesis in the cell.

[0060] According to an additional or alternative aspect there is provided a method of producing cannabinoids in a plant, the method comprising modulating expression in the plant of at least one polypeptide comprising an amino acid sequence at least 95% identical to SEQ ID NO: 1-15 and 18-86 the polypeptide modulating cannabinoid synthesis, thereby producing cannabinoids in the cell.

[0061] As used herein “controlling” refers to artificially (man-made activity) interfering with the natural process of cannabinoid synthesis in the cell and shifting it to a profile of interest. The term can be interchanged with “regulating” or “modulating” or “governing” or “orchestrating”.

[0062] As used herein, a “cannabinoid” is a chemical compound (such as cannabinol, THC or cannabidiol) that is found in the plant species Cannabis among others like Echinacea; Acmella Oleracea; Helichrysum Umbraculigerum; Radula Marginata (Liverwort) and Theobroma Cacao, and metabolites and synthetic analogues thereof that may or may not have psychoactive properties. Cannabinoids therefore include (without limitation) compounds (such as THC) that have high affinity for the cannabinoid receptor (for example Ki<250 nM), and compounds that do not have significant affinity for the cannabinoid receptor (such as cannabidiol, CBD). Cannabinoids also include compounds that have a characteristic dibenzopyran ring structure (of the type seen in THC) and cannabinoids which do not possess a pyran ring (such as cannabidiol). Hence a partial list of cannabinoids includes THC, CBD, dimethyl heptylpentyl cannabidiol (DMHP-CBD), 6,12-dihydro-6-hydroxy-cannabidiol (described in U.S. Pat. No. 5,227,537, incorporated by reference); (3 S,4R)-7-hydroxy-.DELTA.6-tetrahydrocannabinol homologs and derivatives described in U.S. Pat. No. 4,876,276, incorporated by reference; (+)-4-[4-DMH-2,6-diacetoxy-phenyl]-2-carboxy-6,6-dimethylbicyclo[3.1.1]he-pt-2-en, and other 4-phenylpinene derivatives disclosed in U.S. Pat. No. 5,434,295, which is incorporated by reference; and cannabidiol (−)(CBD) analogs such as (−)CBD-monomethylether, (−)CBD dimethyl ether; (−)CBD diacetate; (−)3′-acetyl-CBD monoacetate; and .+−.AF11, all of which are disclosed in Consroe et al., J. Clin. Pharmacol. 21:428S-436S, 1981, which is also incorporated by reference. Many other cannabinoids are similarly disclosed in Agurell et al., Pharmacol. Rev. 38:31-43, 1986, which is also incorporated by reference.

[0063] Examples of cannabinoids are tetrahydrocannabinol, cannabidiol, cannabigerol, cannabichromene, cannabicyclol, cannabivarin, cannabielsoin, cannabicitran, cannabigerolic acid, cannabigerolic acid monomethylether, cannabigerol monomethylether, cannabigerovarinic acid, cannabigerovarin, cannabichromenic acid, cannabichromevarinic acid, cannabichromevarin, cannabidolic acid, cannabidiol monomethylether, cannabidiol-C4, cannabidivarinic acid, cannabidiorcol, delta-9-tetrahydrocannabinolic acid A, delta-9-tetrahydrocannabinolic acid B, delta-9-tetrahydrocannabinolic acid-C4, delta-9-tetrahydrocannabivarinic acid,delta-9-tetrahydrocannabivarin, delta-9-tetrahydrocannabiorcolic acid, delta-9-tetrahydrocannabiorcol,delta-7-cis-iso-tetrahydrocannabivarin, delta-8-tetrahydrocannabiniolic acid, delta-8-tetrahydrocannabinol, cannabicyclolic acid, cannabicylovarin, cannabielsoic acid A, cannabielsoic acid B, cannabinolic acid, cannabinol methylether, cannabinol-C4, cannabinol-C2, cannabiorcol, 10-ethoxy-9-hydroxy-delta-6a-tetrahydrocannabinol, 8,9-dihydroxy-delta-6a-tetrahydrocannabinol, cannabitriolvarin, ethoxy-cannabitriolvarin, dehydrocannabifuran, cannabifuran, cannabichromanon, cannabicitran, 10-oxo-delta-6a-tetrahydrocannabinol, delta-9-cis-tetrahydrocannabinol, 3,4,5,6-tetrahydro-7-hydroxy-alpha-alpha-2-trimethyl-9-n-propyl-2,6-metha-no-2H-1-benzoxocin-5-methanol-cannabiripsol, trihydroxy-delta-9-tetrahydrocannabinol, and cannabinol.

[0064] As mentioned, other plants are also contemplated, especially those which are equipped with a cannabionoid synthesis mechanism. These include, but are not limited to, Phytocannabinoids are known to occur in several plant species besides cannabis. These include Echinacea purpurea, Echinacea angustifolia, Acmella oleracea, Helichrysum umbraculigerum, Humulus lupulus and Radula marginata.

[0065] In an additional embodiment, also contemplated are plant cells or even-non-plant cells e.g., yeast, which are devoid of a cannabinoid synthesis mechanism. These can be modified or supplemented with the relevant enzymes including those contemplated herein and substances to arrive at a functional cannabinoid producing plant, plant cell or another type of cell altogether e.g., yeast.

[0066] Thus embodiments of the invention contemplate genetically engineering “non-cannabinoid or cannabinoid analog producing cells” with a nucleic acid sequence as contemplated herein (involved in the production of cannabinoids). Non-cannabinoid or cannabinoid analog producing cells refer to a cell from any organism that does not produce a cannabinoid or cannabinoid analog. Illustrative cells include but are not limited to plant cells, as well as insect, mammalian, yeast, fungal, algal, or bacterial cells.

[0067] “Fungal cell” refers to any fungal cell that can be transformed with a gene encoding a cannabinoid or cannabinoid analog biosynthesis enzyme and is capable of expressing in recoverable amounts the enzyme or its products. Illustrative fungal cells include yeast cells such as Saccharomyces cerevisiae and Pichia pastoris. Cells of filamentous fungi such as Aspergillus and Trichoderma may also be used.

[0068] According to a specific embodiment, such a cell is a yeast cell.

[0069] Cannabinoid synthesis in yeast can be done using methods known in the art. For example, Laverty et al. Described expression in P. pastoris strains. Following is a non-limiting embodiment.

[0070] CBCAS can be amplified from DNA isolated from FN leaves using gene-specific primers PCR products and cloned into pPICz-alpa B. The expression vectors are then transformed into P. pastoris strain X-33 (Invitrogen) by electroporation. Positive recombinants can be selected for by plating transformed cells on YPD plates supplemented with 25 μg/mL phleomycin. To screen for activity, colonies are used to inoculate 5 mL BMG cultures, which can grow for 2 d at 37° C. with shaking. The cells are then pelleted by centrifugation, and grown for 4 d at 20° C. with shaking with the addition of 1% methanol daily. Enzyme activity can be tested by directly adding CBGA to clarified culture media, incubating and then analyzing products by HPLC as previously described (Laverty et al. 2019).

[0071] A non-limiting list of such cannabinoids is already quite established and some are provided infra. However, it is expected that during the life of a patent maturing from this application many relevant cannabinoids will be uncovered and the scope of the term cannabinoids is intended to include all such new cannabinoids a priori.

[0072] The classical cannabinoids are concentrated in a viscous resin produced in structures known as glandular trichomes. At least 143 different cannabinoids have been isolated from the Cannabis plant.

[0073] The best studied phytocannabinoids include tetrahydrocannabinol (THC), cannabidiol (CBD) and cannabinol (CBN).

[0074] Most classes derive from cannabigerol-type (CBG) compounds and differ mainly in the way this precursor is cyclized. The classical cannabinoids are derived from their respective 2-carboxylic acids (2-COOH) by decarboxylation (catalyzed by heat, light, or alkaline conditions).

THC (tetrahydrocannabinol)
THCA (tetrahydrocannabinolic acid)
CBD (cannabidiol)
CBDA (cannabidiolic acid)
CBN (cannabinol)
CBG (cannabigerol)
CBC (cannabichromene)
CBL (cannabicyclol)
CBV (cannabivarin)
THCV (tetrahydrocannabivarin)
CBDV (cannabidivarin)
CBCV (cannabichromevarin)
CBGV (cannabigerovarin)
CBGM (cannabigerol monomethyl ether)
CBE (cannabielsoin)
CBT (cannabicitran)

### Cannabinodiol (CBDL)

### Cannabigerol Monoethyl Ether (CBGM).

[0075] The term “plant” as used herein encompasses whole plants, a grafted plant, ancestors and progeny of the plants and plant parts, including flowers, trichomes, seeds, shoots, stems, roots, rootstock, scion, and plant cells, tissues and organs. The plant may be in any form including suspension cultures, embryos, meristematic regions, callus tissue, leaves, gametophytes, sporophytes, pollen, and microspores.

[0076] Plants that may be useful in the methods of the invention include all plants which belong to the superfamily Viridiplantee, in particular monocotyledonous and dicotyledonous plants.

[0077] The terms “cannabis” refers to the genus which includes all different species including Cannabis sativa, Cannabis indica and Cannabis ruderalis as well as wild Cannabis.

[0078] According to a specific embodiment, the Cannabis is Cannabis sativa.

[0079] Cannabis is diploid, having a chromosome complement of 2n=20, although polyploid individuals have been artificially produced and are also contemplated herein. The first genome sequence of Cannabis, which is estimated to be 820 Mb in size, was published in 2011.

[0080] All known strains of Cannabis are wind-pollinated and the fruit is an achene. Most strains of Cannabis are short day plants, with the possible exception of C. sativa subsp. sativa var. spontanea (=C. ruderalis), which is commonly described as “auto-flowering” and may be day-neutral.

[0081] Cannabis has long been used for drug and industrial purposes: fiber (hemp), for seed and seed oils, extracts for medicinal purposes, and as a recreational drug. The selected genetic background (e.g., cultivar) depends on the future use.

[0082] The term “variety” as used herein has identical meaning to the corresponding definition in the International Convention for the Protection of New Varieties of Plants (UPOV treaty), of Dec. 2, 1961, as Revised at Geneva on Nov. 10, 1972, on Oct. 23, 1978, and on Mar. 19, 1991. Thus, “variety” means a plant grouping within a single botanical taxon of the lowest known rank, which grouping, irrespective of whether the conditions for the grant of a breeder's right are fully met, can be i) defined by the expression of the characteristics resulting from a given genotype or combination of genotypes, ii) distinguished from any other plant grouping by the expression of at least one of the characteristics and iii) considered as a unit with regard to its suitability for being propagated unchanged.

[0083] The term “variety” is interchangeable with “cultivar”.

[0084] As mentioned, the method is effected by modulating expression in the cell, plant or part thereof of at least one polypeptide comprising an amino acid sequence at least 95% identical to SEQ ID NO: 1-15 and 18-86, the polypeptide being capable of modulating cannabinoid synthesis.

[0085] As used herein “modulating cannabinoid synthesis” means shifting or changing the natural occurring process in the cell, plant or part thereof in terms of cannabinoid profile as compared to the same genetic background without the modulation of the expression of the polypeptide as described herein (also referred to as “control”).

[0086] According to a specific embodiment, the modulating causes an increase in at least one cannabinoid in the modulated cell.

[0087] As used herein the term “increasing” or “increase” refers to at least about 2%, at least about 3%, at least about 4%, at least about 5%, at least about 10%, at least about 15%, at least about 20%, at least about 30%, at least about 40%, at least about 50%, at least about 60%, at least about 70%, at least about 80%, 2 fold, 5 fold, 10 fold, 100 fold increase in the cannabinoid as compared to a control plant (a plant which is not modified with the polynucleotide or polypeptides of the invention), such as a native plant, a wild type plant, a non-transformed plant or a non-genomic edited plant of the same species which is grown under the same (e.g., identical) growth conditions.

[0088] As used herein the term “decreasing” or “decrease” refers to at least about 2%, at least about 3%, at least about 4%, at least about 5%, at least about 10%, at least about 15%, at least about 20%, at least about 30%, at least about 40%, at least about 50%, at least about 60%, at least about 70%, at least about 80%, 2 fold, 5 fold, 10 fold, 100 fold decrease in the cannabinoid as compared to a control plant (a plant which is not modified with the polynucleotide or polypeptides of the invention), such as a native plant, a wild type plant, a non-transformed plant or a non-genomic edited plant of the same species which is grown under the same (e.g., identical) growth conditions.

[0089] The present inventors uncovered 8 groups of genes involved in cannabinoid synthesis.

[0090] According to an embodiment, these genes are cannabinoid synthases.

[0091] These are termed as follows:

[0092] Group 1: CBCAS-like genes (SEQ ID NOs: 87-101 for the polynucleotide sequences; and SEQ ID NOs: 1-15 for the polypeptide sequences).

[0093] Group 2: THCAS-like genes (SEQ ID NOs: 102-103 for the polynucleotide sequences; and SEQ ID NOs: 16-17 for the polypeptide sequences).

[0094] Group 3: (SEQ ID NOs: 104-133 for the polynucleotide sequences; and SEQ ID NOs: 18-47 for the polypeptide sequences).

[0095] Group 4: CBDAS-like genes (SEQ ID NOs: 134-141 for the polynucleotide sequences; and SEQ ID NOs: 48-55 for the polypeptide sequences).

[0096] Group 5: CBGAS-like genes (SEQ ID NOs: 142-149 for the polynucleotide sequences; and SEQ ID NOs: 56-63 for the polypeptide sequences).

[0097] Group 6: (SEQ ID NO: 150 for the polynucleotide sequence; and SEQ ID NOs: 64 for the polypeptide sequence).

[0098] Group 7: (SEQ ID NOs: 151-167 for the polynucleotide sequences; and SEQ ID NOs: 65-81 for the polypeptide sequences).

[0099] Group 8: (SEQ ID NOs: 168-172 for the polynucleotide sequences; and SEQ ID NOs: 82-86 for the polypeptide sequences).

[0100] Contemplated according to some embodiments are sequences with an upstream regulatory sequence. Also contemplated are the open reading frames without the regulatory sequences (starting from the ATG).

[0101] Also contemplated herein are homologs of these genes as further described hereinbelow.

[0102] The present teachings contemplate modulation of at least one (e.g., 2, 3, 4, 5) of the genes mentioned herein. These genes can be from the same group or from different group. According to some embodiments, when more than one gene is modulated then both can be upregulated, both can be downregulated, one can be upregulated while the other downregulated, each of which is considered a different embodiment.

[0103] Modulation of gene expression can be achieved by means of transgenesis, genome editing and especially in plants also by sexual breeding. Each of these options is considered a different embodiment.

[0104] According to one embodiment, modulation refers to upregulating expression of the polypeptide, also referred to as “over-expression”.

[0105] The F2,3 phrase “over-expressing a polypeptide” as used herein refers to increasing the level of the polypeptide within the plant as compared to a control plant of the same species under the same growth conditions.

[0106] According to some embodiments of the invention the increased level of the polypeptide is in a specific cell type or organ of the plant.

[0107] According to some embodiments of the invention, the increased level of the polypeptide is in a temporal time point of the plant.

[0108] Such a regulated gene expression when the shift in the cannabinoid profile is toxic to the plant or the cell.

[0109] According to some embodiments of the invention, the increased level of the polypeptide is during the whole life cycle of the plant.

[0110] For example, over-expression of a polypeptide can be achieved by elevating the expression level of a native gene of a plant as compared to a control plant. This can be done for example, by means of genome editing which are further described hereinunder, e.g., by introducing mutation(s) in regulatory element(s) (e.g., an enhancer, a promoter, an untranslated region, an intronic region) which result in upregulation of the native gene, and/or by Homology Directed Repair (HDR), e.g., for introducing a “repair template” encoding the polypeptide-of-interest.

[0111] Additionally and/or alternatively, over-expression of a polypeptide can be achieved by increasing a level of a polypeptide-of-interest due to expression of a heterologous polynucleotide by means of recombinant DNA technology, e.g., using a nucleic acid construct comprising a polynucleotide encoding the polypeptide-of-interest.

[0112] It should be noted that in case the plant-of-interest (e.g., a plant for which over-expression of a polypeptide is desired) has no detectable expression level of the polypeptide-of-interest prior to employing the method of some embodiments of the invention, qualifying an “over-expression” of the polypeptide in the plant is performed by determination of a positive detectable expression level of the polypeptide-of-interest in a plant cell and/or a plant.

[0113] Additionally and/or alternatively in case the plant-of-interest (e.g., a plant for which over-expression of a polypeptide is desired) has some degree of detectable expression level of the polypeptide-of-interest prior to employing the method of some embodiments of the invention, qualifying an “over-expression” of the polypeptide in the plant is performed by determination of an increased level of expression of the polypeptide-of-interest in a plant cell and/or a plant as compared to a control plant cell and/or plant, respectively, of the same species which is grown under the same (e.g., identical) growth conditions.

[0114] Methods of detecting presence or absence of a polypeptide in a plant cell and/or in a plant, as well as quantification of protein expression levels are well known in the art (e.g., protein detection methods), and are further described hereinunder.

[0115] As used herein the phrase “expressing an exogenous polynucleotide encoding a polypeptide” refers to expression at the mRNA level.

[0116] As used herein the phrase “expressing an exogenous polynucleotide encoding a polypeptide” refers to expression at the mRNA level.

[0117] As used herein, the phrase “exogenous polynucleotide” refers to a heterologous nucleic acid sequence which may not be naturally expressed within the plant (e.g., a nucleic acid sequence from a different species) or which overexpression in the plant is desired. The exogenous polynucleotide may be introduced into the plant in a stable or transient manner, so as to produce a ribonucleic acid (RNA) molecule and/or a polypeptide molecule. It should be noted that the exogenous polynucleotide may comprise a nucleic acid sequence which is identical or partially homologous to an endogenous nucleic acid sequence of the plant.

[0118] The term “endogenous” as used herein refers to any polynucleotide or polypeptide which is present and/or naturally expressed within a plant or a cell thereof.

[0119] According to some embodiments of the invention, the exogenous polynucleotide of the invention comprises a nucleic acid sequence encoding a polypeptide having an amino acid sequence about 90%, at least about 91%, at least about 92%, at least about 93%, at least about 94%, at least about 95%, at least about 96%, at least about 97%, at least about 98%, at least about 99%, or more say 100% identity to the amino acid sequence selected from the group consisting of SEQ ID NOs: 1-15 and 18-86.

[0120] According to some embodiments of the invention, the exogenous polynucleotide of the invention comprises a nucleic acid sequence encoding a polypeptide having an amino acid sequence at least about 95%, at least about 96%, at least about 97%, at least about 98%, at least about 99%, or more say 100% identity to the amino acid sequence selected from the group consisting of SEQ ID NOs: 1-15 and 18-86.

[0121] According to some embodiments of the invention, the exogenous polynucleotide of the invention comprises a nucleic acid sequence encoding a polypeptide having an amino acid sequence at least about 99%, at least about 99.5%, or more say 100% identity to the amino acid sequence selected from the group consisting of SEQ ID NOs: 1-15 and 18-86.

[0122] Homologous sequences include both orthologous and paralogous sequences. The term “paralogous” relates to gene-duplications within the genome of a species leading to paralogous genes. The term “orthologous” relates to homologous genes in different organisms due to ancestral relationship. Thus, orthologs are evolutionary counterparts derived from a single ancestral gene in the last common ancestor of given two species (Koonin E V and Galperin M Y (Sequence—Evolution—Function: Computational Approaches in Comparative Genomics. Boston: Kluwer Academic; 2003. Chapter 2, Evolutionary Concept in Genetics and Genomics. Available from: ncbi (dot) nlm (dot) nih (dot) gov/books/NBK20255) and therefore have great likelihood of having the same function.

[0123] One option to identify orthologues in monocot plant species is by performing a reciprocal blast search. This may be done by a first blast involving blasting the sequence-of-interest against any sequence database, such as the publicly available NCBI database which may be found at: ncbi (dot) nlm (dot) nih (dot) gov. If orthologues in rice were sought, the sequence-of-interest would be blasted against, for example, the 28,469 full-length cDNA clones from Oryza sativa Nipponbare available at NCBI. The blast results may be filtered. The full-length sequences of either the filtered results or the non-filtered results are then blasted back (second blast) against the sequences of the organism from which the sequence-of-interest is derived. The results of the first and second blasts are then compared. An orthologue is identified when the sequence resulting in the highest score (best hit) in the first blast identifies in the second blast the query sequence (the original sequence-of-interest) as the best hit. Using the same rational a paralogue (homolog to a gene in the same organism) is found. In case of large sequence families, the ClustalW program may be used [ebi (dot) ac (dot) uk/Tools/clustalw2/index (dot) html], followed by a neighbor-joining tree (wikipedia (dot) org/wiki/Neighbor-joining) which helps visualizing the clustering.

[0124] Homology (e.g., percent homology, sequence identity+sequence similarity) can be determined using any homology comparison software computing a pairwise sequence alignment.

[0125] As used herein, “sequence identity” or “identity” in the context of two nucleic acid or polypeptide sequences includes reference to the residues in the two sequences which are the same when aligned. When percentage of sequence identity is used in reference to proteins it is recognized that residue positions which are not identical often differ by conservative amino acid substitutions, where amino acid residues are substituted for other amino acid residues with similar chemical properties (e.g. charge or hydrophobicity) and therefore do not change the functional properties of the molecule. Where sequences differ in conservative substitutions, the percent sequence identity may be adjusted upwards to correct for the conservative nature of the substitution. Sequences which differ by such conservative substitutions are considered to have “sequence similarity” or “similarity”. Means for making this adjustment are well-known to those of skill in the art. Typically this involves scoring a conservative substitution as a partial rather than a full mismatch, thereby increasing the percentage sequence identity. Thus, for example, where an identical amino acid is given a score of 1 and a non-conservative substitution is given a score of zero, a conservative substitution is given a score between zero and 1. The scoring of conservative substitutions is calculated, e.g., according to the algorithm of Henikoff S and Henikoff J G. [Amino acid substitution matrices from protein blocks. Proc. Natl. Acad. Sci. U.S.A. 1992, 89(22): 10915-9].

[0126] Identity (e.g., percent homology) can be determined using any homology comparison software, including for example, the BlastN software of the National Center of Biotechnology Information (NCBI) such as by using default parameters.

[0127] According to some embodiments of the invention, the identity is a global identity, i.e., an identity over the entire amino acid or nucleic acid sequences of the invention and not over portions thereof.

[0128] According to some embodiments of the invention, the term “homology” or “homologous” refers to identity of two or more nucleic acid sequences; or identity of two or more amino acid sequences; or the identity of an amino acid sequence to one or more nucleic acid sequence.

[0129] According to some embodiments of the invention, the homology is a global homology, i.e., an homology over the entire amino acid or nucleic acid sequences of the invention and not over portions thereof.

[0130] The degree of homology or identity between two or more sequences can be determined using various known sequence comparison tools. Following is a non-limiting description of such tools which can be used along with some embodiments of the invention.

[0131] Pairwise global alignment was defined by S. B. Needleman and C. D. Wunsch, “A general method applicable to the search of similarities in the amino acid sequence of two proteins” Journal of Molecular Biology, 1970, pages 443-53, volume 48).

[0132] For example, when starting from a polypeptide sequence and comparing to other polypeptide sequences, the EMBOSS-6.0.1 Needleman-Wunsch algorithm (available from emboss(dot)sourceforge(dot)net/apps/cvs/emboss/apps/needle(dot)html) can be used to find the optimum alignment (including gaps) of two sequences along their entire length—a “Global alignment”. Default parameters for Needleman-Wunsch algorithm (EMBOSS-6.0.1) include: gapopen=10; gapextend=0.5; datafile=EBLOSUM62; brief=YES.

[0133] According to some embodiments of the invention, the parameters used with the EMBOSS-6.0.1 tool (for protein-protein comparison) include: gapopen=8; gapextend=2; datafile=EBLOSUM62; brief=YES.

[0134] According to some embodiments of the invention, the threshold used to determine homology using the EMBOSS-6.0.1 Needleman-Wunsch algorithm is 80%, 81%, 82%, 83%, 84%, 85%, 86%, 87%, 88%, 89%, 90%, 91%, 92%, 93%, 94%, 95%, 96%, 97%, 98%, 99%, or 100%.

[0135] When starting from a polypeptide sequence and comparing to polynucleotide sequences, the OneModel FramePlus algorithm [Halperin, E., Faigler, S. and Gill-More, R. (1999)—FramePlus: aligning DNA to protein sequences. Bioinformatics, 15, 867-873) (available from biocceleration(dot)com/Products(dot)html] can be used with following default parameters: model=frame+_p2n.model mode=local.

[0136] According to some embodiments of the invention, the parameters used with the OneModel FramePlus algorithm are model=frame+_p2n.model, mode=qglobal.

[0137] According to some embodiments of the invention, the threshold used to determine homology using the OneModel FramePlus algorithm is 80%, 81%, 82%, 83%, 84%, 85%, 86%, 87%, 88%, 89%, 90%, 91%, 92%, 93%, 94%, 95%, 96%, 97%, 98%, 99%, or 100%.

[0138] When starting with a polynucleotide sequence and comparing to other polynucleotide sequences the EMBOSS-6.0.1 Needleman-Wunsch algorithm (available from emboss(dot)sourceforge(dot)net/apps/cvs/emboss/apps/needle(dot)html) can be used with the following default parameters: (EMBOSS-6.0.1) gapopen=10; gapextend=0.5; datafile=EDNAFULL; brief=YES.

[0139] According to some embodiments of the invention, the parameters used with the EMBOSS-6.0.1 Needleman-Wunsch algorithm are gapopen=10; gapextend=0.2; datafile=EDNAFULL; brief=YES.

[0140] According to some embodiments of the invention, the threshold used to determine homology using the EMBOSS-6.0.1 Needleman-Wunsch algorithm for comparison of polynucleotides with polynucleotides is 80%, 81%, 82%, 83%, 84%, 85%, 86%, 87%, 88%, 89%, 90%, 91%, 92%, 93%, 94%, 95%, 96%, 97%, 98%, 99%, or 100%.

[0141] According to some embodiment, determination of the degree of homology further requires employing the Smith-Waterman algorithm (for protein-protein comparison or nucleotide-nucleotide comparison).

[0142] Default parameters for GenCore 6.0 Smith-Waterman algorithm include: model=sw.model.

[0143] According to some embodiments of the invention, the threshold used to determine homology using the Smith-Waterman algorithm is 80%, 81%, 82%, 83%, 84%, 85%, 86%, 87%, 88%, 89%, 90%, 91%, 92%, 93%, 94%, 95%, 96%, 97%, 98%, 99%, or 100%.

[0144] According to some embodiments of the invention, the global homology is performed on sequences which are pre-selected by local homology to the polypeptide or polynucleotide of interest (e.g., 95% identity over 60% of the sequence length), prior to performing the global homology to the polypeptide or polynucleotide of interest (e.g., 95% global homology on the entire sequence). For example, homologous sequences are selected using the BLAST software with the Blastp and tBlastn algorithms as filters for the first stage, and the needle (EMBOSS package) or Frame+ algorithm alignment for the second stage. Local identity (Blast alignments) is defined with a very permissive cutoff—95% Identity on a span of 60% of the sequences lengths because it is used only as a filter for the global alignment stage. In this specific embodiment (when the local identity is used), the default filtering of the Blast package is not utilized (by setting the parameter “-F F”).

[0145] In the second stage, homologs are defined based on a global identity of at least 95% or 99% to the core gene polypeptide sequence.

[0146] According to some embodiments of the invention, the exogenous polynucleotide of the invention encodes a polypeptide as described herein.

[0147] According to some embodiments of the invention, the exogenous polynucleotide encodes a polypeptide consisting of the amino acid sequence set forth by SEQ ID NO: 1-15 and 18-86.

[0148] As used herein the term “polynucleotide” refers to a single or double stranded nucleic acid sequence which is isolated and provided in the form of an RNA sequence, a complementary polynucleotide sequence (cDNA), a genomic polynucleotide sequence and/or a composite polynucleotide sequences (e.g., a combination of the above).

[0149] The term “isolated” refers to at least partially separated from the natural environment e.g., from a plant cell.

[0150] As used herein the phrase “complementary polynucleotide sequence” refers to a sequence, which results from reverse transcription of messenger RNA using a reverse transcriptase or any other RNA dependent DNA polymerase. Such a sequence can be subsequently amplified in vivo or in vitro using a DNA dependent DNA polymerase.

[0151] As used herein the phrase “genomic polynucleotide sequence” refers to a sequence derived (isolated) from a chromosome and thus it represents a contiguous portion of a chromosome.

[0152] As used herein the phrase “composite polynucleotide sequence” refers to a sequence, which is at least partially complementary and at least partially genomic. A composite sequence can include some exonal sequences required to encode the polypeptide of the present invention, as well as some intronic sequences interposing therebetween. The intronic sequences can be of any source, including of other genes, and typically will include conserved splicing signal sequences. Such intronic sequences may further include cis acting expression regulatory elements.

[0153] Nucleic acid sequences encoding the polypeptides of the present invention may be optimized for expression. Examples of such sequence modifications include, but are not limited to, an altered G/C content to more closely approach that typically found in the plant species of interest, and the removal of codons atypically found in the plant species commonly referred to as codon optimization.

[0154] The phrase “codon optimization” refers to the selection of appropriate DNA nucleotides for use within a structural gene or fragment thereof that approaches codon usage within the plant of interest. Therefore, an optimized gene or nucleic acid sequence refers to a gene in which the nucleotide sequence of a native or naturally occurring gene has been modified in order to utilize statistically-preferred or statistically-favored codons within the plant. The nucleotide sequence typically is examined at the DNA level and the coding region optimized for expression in the plant species determined using any suitable procedure, for example as described in Sardana et al. (1996, Plant Cell Reports 15:677-681). In this method, the standard deviation of codon usage, a measure of codon usage bias, may be calculated by first finding the squared proportional deviation of usage of each codon of the native gene relative to that of highly expressed plant genes, followed by a calculation of the average squared deviation. The formula used is: 1 SDCU=n=1 N [(Xn−Yn)/Yn] 2/N, where Xn refers to the frequency of usage of codon n in highly expressed plant genes, where Yn to the frequency of usage of codon n in the gene of interest and N refers to the total number of codons in the gene of interest. A Table of codon usage from highly expressed genes of dicotyledonous plants is compiled using the data of Murray et al. (1989, Nuc Acids Res. 17:477-498).

[0155] One method of optimizing the nucleic acid sequence in accordance with the preferred codon usage for a particular plant cell type is based on the direct use, without performing any extra statistical calculations, of codon optimization Tables such as those provided on-line at the Codon Usage Database through the NIAS (National Institute of Agrobiological Sciences) DNA bank in Japan (kazusa (dot) or (dot) jp/codon/). The Codon Usage Database contains codon usage tables for a number of different species, with each codon usage Table having been statistically determined based on the data present in Genbank.

[0156] By using the above Tables to determine the most preferred or most favored codons for each amino acid in a particular species (for example, rice), a naturally-occurring nucleotide sequence encoding a protein of interest can be codon optimized for that particular plant species. This is effected by replacing codons that may have a low statistical incidence in the particular species genome with corresponding codons, in regard to an amino acid, that are statistically more favored. However, one or more less-favored codons may be selected to delete existing restriction sites, to create new ones at potentially useful junctions (5′ and 3′ ends to add signal peptide or termination cassettes, internal sites that might be used to cut and splice segments together to produce a correct full-length sequence), or to eliminate nucleotide sequences that may negatively effect mRNA stability or expression.

[0157] The naturally-occurring encoding nucleotide sequence may already, in advance of any modification, contain a number of codons that correspond to a statistically-favored codon in a particular plant species. Therefore, codon optimization of the native nucleotide sequence may comprise determining which codons, within the native nucleotide sequence, are not statistically-favored with regards to a particular plant, and modifying these codons in accordance with a codon usage table of the particular plant to produce a codon optimized derivative. A modified nucleotide sequence may be fully or partially optimized for plant codon usage provided that the protein encoded by the modified nucleotide sequence is produced at a level higher than the protein encoded by the corresponding naturally occurring or native gene. Construction of synthetic genes by altering the codon usage is described in for example PCT Patent Application 93/07278.

[0158] Thus, the invention encompasses nucleic acid sequences described hereinabove; fragments thereof, sequences hybridizable therewith, sequences homologous thereto, sequences encoding similar polypeptides with different codon usage, altered sequences characterized by mutations, such as deletion, insertion or substitution of one or more nucleotides, either naturally occurring or man induced, either randomly or in a targeted fashion.

[0159] According to some embodiments of the invention, the exogenous polynucleotide encodes a polypeptide comprising an amino acid sequence at least about 90%, at least about 91%, at least about 92%, at least about 93%, at least about 93%, at least about 94%, at least about 95%, at least about 96%, at least about 97%, at least about 98%, at least about 99%, e.g., 100% identical to the amino acid sequence of a naturally occurring plant orthologue of the polypeptide selected from the group consisting of SEQ ID NOs: 1-15 and 18-86.

[0160] According to some embodiments of the invention, the polypeptide comprising an amino acid sequence at least 95%, at least about 96%, at least about 97%, at least about 98%, at least about 99%, e.g., 100% identical to the amino acid sequence of a naturally occurring plant orthologue of the polypeptide selected from the group consisting of SEQ ID NOs: 1-15 and 18-86.

[0161] According to some embodiments of the invention, the polypeptide comprising an amino acid sequence at least about 99%, e.g., 100% identical to the amino acid sequence of a naturally occurring plant orthologue of the polypeptide selected from the group consisting of SEQ ID NOs: 1-15 and 18-86.

[0162] The invention provides an isolated polynucleotide comprising a nucleic acid sequence at least about 90%, at least about 91%, at least about 92%, at least about 93%, at least about 93%, at least about 94%, at least about 95%, at least about 96%, at least about 97%, at least about 98%, at least about 99%, e.g., 100% identical to the polynucleotide selected from the group consisting of SEQ ID NOs: 87-101 and 104-173.

[0163] The invention provides an isolated polynucleotide comprising a nucleic acid sequence at least about 95%, at least about 96%, at least about 97%, at least about 98%, at least about 99%, e.g., 100% identical to the polynucleotide selected from the group consisting of SEQ ID NOs: 87-101 and 104-173.

[0164] The invention provides an isolated polynucleotide comprising a nucleic acid sequence at least about 99%, 99.5% e.g., 100% identical to the polynucleotide selected from the group consisting of SEQ ID NOs: 87-101 and 104-173.

[0165] According to some embodiments of the invention the nucleic acid sequence (or actually polypeptide encoded thereby) is capable of modulating cannabis synthesis. In other words affecting the cannabinoid profile of the plant or cell.

Downregulation (gene silencing) of the transcription or translation product of an endogenous gene can be achieved by co-suppression, antisense suppression, RNA intereference and ribozyme molecules.

[0166] Co-suppression (sense suppression)—Inhibition of the endogenous gene can be achieved by co-suppression, using an RNA molecule (or an expression vector encoding same) which is in the sense orientation with respect to the transcription direction of the endogenous gene. The polynucleotide used for co-suppression may correspond to all or part of the sequence encoding the endogenous polypeptide and/or to all or part of the 5′ and/or 3′ untranslated region of the endogenous transcript; it may also be an unpolyadenylated RNA; an RNA which lacks a 5′ cap structure; or an RNA which contains an unsplicable intron. In some embodiments, the polynucleotide used for co-suppression is designed to eliminate the start codon of the endogenous polynucleotide so that no protein product will be translated. Methods of co-suppression using a full-length cDNA sequence as well as a partial cDNA sequence are known in the art (see, for example, U.S. Pat. No. 5,231,020).

[0167] According to some embodiments of the invention, downregulation of the endogenous gene is performed using an amplicon expression vector which comprises a plant virus-derived sequence that contains all or part of the target gene but generally not all of the genes of the native virus. The viral sequences present in the transcription product of the expression vector allow the transcription product to direct its own replication. The transcripts produced by the amplicon may be either sense or antisense relative to the target sequence [see for example, Angell and Baulcombe, (1997) EMBO J. 16:3675-3684; Angell and Baulcombe, (1999) Plant J. 20:357-362, and U.S. Pat. No. 6,646,805, each of which is herein incorporated by reference].

[0168] Antisense suppression—Antisense suppression can be performed using an antisense polynucleotide or an expression vector which is designed to express an RNA molecule complementary to all or part of the messenger RNA (mRNA) encoding the endogenous polypeptide and/or to all or part of the 5′ and/or 3′ untranslated region of the endogenous gene. Over expression of the antisense RNA molecule can result in reduced expression of the native (endogenous) gene. The antisense polynucleotide may be fully complementary to the target sequence (i.e., 100% identical to the complement of the target sequence) or partially complementary to the target sequence (i.e., less than 100% identical, e.g., less than 90%, less than 80% identical to the complement of the target sequence). Antisense suppression may be used to inhibit the expression of multiple proteins in the same plant (see e.g., U.S. Pat. No. 5,942,657). In addition, portions of the antisense nucleotides may be used to disrupt the expression of the target gene. Generally, sequences of at least about 50 nucleotides, at least about 100 nucleotides, at least about 200 nucleotides, at least about 300, at least about 400, at least about 450, at least about 500, at least about 550, or greater may be used. Methods of using antisense suppression to inhibit the expression of endogenous genes in plants are described, for example, in Liu, et al., (2002) Plant Physiol. 129:1732-1743 and U.S. Pat. Nos. 5,759,829 and 5,942,657, each of which is herein incorporated by reference. Efficiency of antisense suppression may be increased by including a poly-dT region in the expression cassette at a position 3′ to the antisense sequence and 5′ of the polyadenylation signal [See, U.S. Patent Publication No. 20020048814, herein incorporated by reference].

[0169] RNA intereference—RNA intereference can be achieved using a polynucleotide, which can anneal to itself and form a double stranded RNA having a stem-loop structure (also called hairpin structure), or using two polynucleotides, which form a double stranded RNA.

[0170] For hairpin RNA (hpRNA) interference, the expression vector is designed to express an RNA molecule that hybridizes to itself to form a hairpin structure that comprises a single-stranded loop region and a base-paired stem.

[0171] In some embodiments of the invention, the base-paired stem region of the hpRNA molecule determines the specificity of the RNA interference. In this configuration, the sense sequence of the base-paired stem region may correspond to all or part of the endogenous mRNA to be downregulated, or to a portion of a promoter sequence controlling expression of the endogenous gene to be inhibited; and the antisense sequence of the base-paired stem region is fully or partially complementary to the sense sequence. Such hpRNA molecules are highly efficient at inhibiting the expression of endogenous genes, in a manner which is inherited by subsequent generations of plants [See, e.g., Chuang and Meyerowitz, (2000) Proc. Natl. Acad. Sci. USA 97:4985-4990; Stoutjesdijk, et al., (2002) Plant Physiol. 129:1723-1731; and Waterhouse and Helliwell, (2003) Nat. Rev. Genet. 4:29-38; Chuang and Meyerowitz, (2000) Proc. Natl. Acad. Sci. USA 97:4985-4990; Pandolfini et al., BMC Biotechnology 3:7; Panstruga, et al., (2003) Mol. Biol. Rep. 30:135-140; and U.S. Patent Publication No. 2003/0175965; each of which is incorporated by reference].

[0172] According to some embodiments of the invention, the sense sequence of the base-paired stem is from about 10 nucleotides to about 2,500 nucleotides in length, e.g., from about 10 nucleotides to about 500 nucleotides, e.g., from about 15 nucleotides to about 300 nucleotides, e.g., from about 20 nucleotides to about 100 nucleotides, e.g., or from about 25 nucleotides to about 100 nucleotides.

[0173] According to some embodiments of the invention, the antisense sequence of the base-paired stem may have a length that is shorter, the same as, or longer than the length of the corresponding sense sequence.

[0174] According to some embodiments of the invention, the loop portion of the hpRNA can be from about 10 nucleotides to about 500 nucleotides in length, for example from about 15 nucleotides to about 100 nucleotides, from about 20 nucleotides to about 300 nucleotides or from about 25 nucleotides to about 400 nucleotides in length.

[0175] According to some embodiments of the invention, the loop portion of the hpRNA can include an intron (ihpRNA), which is capable of being spliced in the host cell. The use of an intron minimizes the size of the loop in the hairpin RNA molecule following splicing and thus increases efficiency of the interference [See, for example, Smith, et al., (2000) Nature 407:319-320; Wesley, et al., (2001) Plant J. 27:581-590; Wang and Waterhouse, (2001) Curr. Opin. Plant Biol. 5:146-150; Helliwell and Waterhouse, (2003) Methods 30:289-295; Brummell, et al. (2003) Plant J. 33:793-800; and U.S. Patent Publication No. 2003/0180945; WO 98/53083; WO 99/32619; WO 98/36083; WO 99/53050; US 20040214330; US 20030180945; U.S. Pat. Nos. 5,034,323; 6,452,067; 6,777,588; 6,573,099 and 6,326,527; each of which is herein incorporated by reference].

[0176] In some embodiments of the invention, the loop region of the hairpin RNA determines the specificity of the RNA interference to its target endogenous RNA. In this configuration, the loop sequence corresponds to all or part of the endogenous messenger RNA of the target gene. See, for example, WO 02/00904; Mette, et al., (2000) EMBO J 19:5194-5201; Matzke, et al., (2001) Curr. Opin. Genet. Devel. 11:221-227; Scheid, et al., (2002) Proc. Natl. Acad. Sci., USA 99:13659-13662; Aufsaftz, et al., (2002) Proc. Nat'l. Acad. Sci. 99(4):16499-16506; Sijen, et al., Curr. Biol. (2001) 11:436-440), each of which is incorporated herein by reference.

[0177] For double-stranded RNA (dsRNA) interference, the sense and antisense RNA molecules can be expressed in the same cell from a single expression vector (which comprises sequences of both strands) or from two expression vectors (each comprising the sequence of one of the strands). Methods for using dsRNA interference to inhibit the expression of endogenous plant genes are described in Waterhouse, et al., (1998) Proc. Natl. Acad. Sci. USA 95:13959-13964; and WO 99/49029, WO 99/53050, WO 99/61631, and WO 00/49035; each of which is herein incorporated by reference.

[0178] According to some embodiments of the invention, RNA interference is effected using an expression vector designed to express an RNA molecule that is modeled on an endogenous micro RNAs (miRNA) gene. Micro RNAs (miRNAs) are regulatory agents consisting of about 22 ribonucleotides and highly efficient at inhibiting the expression of endogenous genes [Javier, et al., (2003) Nature 425:257-263]. The miRNA gene encodes an RNA that forms a hairpin structure containing a 22-nucleotide sequence that is complementary to the endogenous target gene.

[0179] Ribozyme—Catalytic RNA molecules, ribozymes, are designed to cleave particular mRNA transcripts, thus preventing expression of their encoded polypeptides. Ribozymes cleave mRNA at site-specific recognition sequences. For example, “hammerhead ribozymes” (see, for example, U.S. Pat. No. 5,254,678) cleave mRNAs at locations dictated by flanking regions that form complementary base pairs with the target mRNA. The sole requirement is that the target RNA contains a 5′-UG-3′ nucleotide sequence. Hammerhead ribozyme sequences can be embedded in a stable RNA such as a transfer RNA (tRNA) to increase cleavage efficiency in vivo [Perriman et al. (1995) Proc. Natl. Acad. Sci. USA, 92(13):6175-6179; de Feyter and Gaudron Methods in Molecular Biology, Vol. 74, Chapter 43, “Expressing Ribozymes in Plants”, Edited by Turner, P. C, Humana Press Inc., Totowa, N.J.; U.S. Pat. No. 6,423,885]. RNA endoribonucleases such as that found in Tetrahymena thermophila are also useful ribozymes (U.S. Pat. No. 4,987,071).

[0180] Genome editing can also be used as mentioned hereinabove for over-expression (gain of function) or downregulation (loss of function).

[0181] Genome editing is a powerful mean to impact target traits by modifications of the target plant genome sequence. Such modifications can result in new or modified alleles or regulatory elements. Thus, genome editing employs reverse genetics by artificially engineered nucleases to cut and create specific double-stranded breaks at a desired location(s) in the genome, which are then repaired by cellular endogenous processes such as, homology directed repair (HDR) and non-homologous end-joining (NHEJ). NHEJ directly joins the DNA ends in a double-stranded break, while HDR utilizes a homologous sequence as a template for regenerating the missing DNA sequence at the break point. In order to introduce specific nucleotide modifications to the genomic DNA, a DNA repair template containing the desired sequence must be present during HDR. Genome editing cannot be performed using traditional restriction endonucleases since most restriction enzymes recognize a few base pairs on the DNA as their target and the probability is very high that the recognized base pair combination will be found in many locations across the genome resulting in multiple cuts not limited to a desired location. To overcome this challenge and create site-specific single- or double-stranded breaks, several distinct classes of nucleases have been discovered and bioengineered to date. These include the meganucleases, Zinc finger nucleases (ZFNs), transcription-activator like effector nucleases (TALENs) and CRISPR/Cas system.

[0182] Since most genome-editing techniques can leave behind minimal traces of DNA alterations evident in a small number of nucleotides as compared to transgenic plants, crops created through gene editing could avoid the stringent regulation procedures commonly associated with genetically modified (GM) crop development. On the other hand, the traces of genome-edited techniques can be used for marker assisted selection (MAS) as is further described hereinunder. Target plants for the mutagenesis/genome editing methods according to the invention are any plants of interest including monocot or dicot plants.

[0183] Over expression of a polypeptide by genome editing can be achieved by: (i) replacing an endogenous sequence encoding the polypeptide of interest or a regulatory sequence under the control which it is placed, and/or (ii) inserting a new gene encoding the polypeptide of interest in a targeted region of the genome, and/or (iii) introducing point mutations which result in upregulation of the gene encoding the polypeptide of interest (e.g., by altering the regulatory sequences such as promoter, enhancers, 5′-UTR and/or 3′-UTR, or mutations in the coding sequence).

[0184] Homology Directed Repair (HDR)

[0185] Homology Directed Repair (HDR) can be used to generate specific nucleotide changes (also known as gene “edits”) ranging from a single nucleotide change to large insertions. In order to utilize HDR for gene editing, a DNA “repair template” containing the desired sequence must be delivered into the cell type of interest with the guide RNA [gRNA(s)] and Cas9 or Cas9 nickase. The repair template must contain the desired edit as well as additional homologous sequence immediately upstream and downstream of the target (termed left and right homology arms). The length and binding position of each homology arm is dependent on the size of the change being introduced. The repair template can be a single stranded oligonucleotide, double-stranded oligonucleotide, or double-stranded DNA plasmid depending on the specific application. It is worth noting that the repair template must lack the Protospacer Adjacent Motif (PAM) sequence that is present in the genomic DNA, otherwise the repair template becomes a suitable target for Cas9 cleavage. For example, the PAM could be mutated such that it is no longer present, but the coding region of the gene is not affected (i.e. a silent mutation).

[0186] The efficiency of HDR is generally low (<10% of modified alleles) even in cells that express Cas9, gRNA and an exogenous repair template. For this reason, many laboratories are attempting to artificially enhance HDR by synchronizing the cells within the cell cycle stage when HDR is most active, or by chemically or genetically inhibiting genes involved in Non-Homologous End Joining (NHEJ). The low efficiency of HDR has several important practical implications. First, since the efficiency of Cas9 cleavage is relatively high and the efficiency of HDR is relatively low, a portion of the Cas9-induced double strand breaks (DSBs) will be repaired via NHEJ. In other words, the resulting population of cells will contain some combination of wild-type alleles, NHEJ-repaired alleles, and/or the desired HDR-edited allele. Therefore, it is important to confirm the presence of the desired edit experimentally, and if necessary, isolate clones containing the desired edit.

[0187] The HDR method was successfully used for targeting a specific modification in a coding sequence of a gene in plants (Budhagatapalli Nagaveni et al. 2015. “Targeted Modification of Gene Function Exploiting Homology-Directed Repair of TALEN-Mediated Double-Strand Breaks in Barley”. G3 (Bethesda). 2015 September; 5(9): 1857-1863). Thus, the gfp-specific transcription activator-like effector nucleases were used along with a repair template that, via HDR, facilitates conversion of gfp into yfp, which is associated with a single amino acid exchange in the gene product. The resulting yellow-fluorescent protein accumulation along with sequencing confirmed the success of the genomic editing.

[0188] Similarly, Zhao Yongping et al. 2016 (An alternative strategy for targeted gene replacement in plants using a dual-sgRNA/Cas9 design. Scientific Reports 6, Article number: 23890 (2016)) describe co-transformation of Arabidopsis plants with a combinatory dual-sgRNA/Cas9 vector that successfully deleted miRNA gene regions (MIR169a and MIR827a) and second construct that contains sites homologous to Arabidopsis TERMINAL FLOWER 1 (TFL1) for homology-directed repair (HDR) with regions corresponding to the two sgRNAs on the modified construct to provide both targeted deletion and donor repair for targeted gene replacement by HDR.

[0189] Activation of Target Genes Using CRISPR/Cas9

[0190] Many bacteria and archea contain endogenous RNA-based adaptive immune systems that can degrade nucleic acids of invading phages and plasmids. These systems consist of clustered regularly interspaced short palindromic repeat (CRISPR) genes that produce RNA components and CRISPR associated (Cas) genes that encode protein components. The CRISPR RNAs (crRNAs) contain short stretches of homology to specific viruses and plasmids and act as guides to direct Cas nucleases to degrade the complementary nucleic acids of the corresponding pathogen. Studies of the type II CRISPR/Cas system of Streptococcus pyogenes have shown that three components form an RNA/protein complex and together are sufficient for sequence-specific nuclease activity: the Cas9 nuclease, a crRNA containing 20 base pairs of homology to the target sequence, and a trans-activating crRNA (tracrRNA) (Jinek et al. Science (2012) 337: 816-821.). It was further demonstrated that a synthetic chimeric guide RNA (gRNA) composed of a fusion between crRNA and tracrRNA could direct Cas9 to cleave DNA targets that are complementary to the crRNA in vitro. It was also demonstrated that transient expression of CRISPR-associated endonuclease (Cas9) in conjunction with synthetic gRNAs can be used to produce targeted double-stranded brakes in a variety of different species.

[0191] The CRISPR/Cas9 system is a remarkably flexible tool for genome manipulation. A unique feature of Cas9 is its ability to bind target DNA independently of its ability to cleave target DNA. Specifically, both RuvC- and HNH-nuclease domains can be rendered inactive by point mutations (D10A and H840A in SpCas9), resulting in a nuclease dead Cas9 (dCas9) molecule that cannot cleave target DNA. The dCas9 molecule retains the ability to bind to target DNA based on the gRNA targeting sequence. The dCas9 can be tagged with transcriptional activators, and targeting these dCas9 fusion proteins to the promoter region results in robust transcription activation of downstream target genes. The simplest dCas9-based activators consist of dCas9 fused directly to a single transcriptional activator. Importantly, unlike the genome modifications induced by Cas9 or Cas9 nickase, dCas9-mediated gene activation is reversible, since it does not permanently modify the genomic DNA.

[0192] Indeed, genome editing was successfully used to over-express a protein of interest in a plant by, for example, mutating a regulatory sequence, such as a promoter to overexpress the endogenous polynucleotide operably linked to the regulatory sequence. For example, U.S. Patent Application Publication No. 20160102316 to Rubio Munoz, Vicente et al. which is fully incorporated herein by reference, describes plants with increased expression of an endogenous DDA1 plant nucleic acid sequence wherein the endogenous DDA1 promoter carries a mutation introduced by mutagenesis or genome editing which results in increased expression of the DDA1 gene, using for example, CRISPR. The method involves targeting of Cas9 to the specific genomic locus, in this case DDA1, via a 20 nucleotide guide sequence of the single-guide RNA. An online CRISPR Design Tool can identify suitable target sites (www(dot)tools(dot)genome-engineering(dot)org. Ran et al. Genome engineering using the CRISPR-Cas9 system nature protocols, VOL. 8 NO. 11, 2281-2308, 2013).

[0193] The CRISPR-Cas system was used for altering gene expression in plants as described in U.S. Patent Application publication No. 20150067922 to Yang; Yinong et al., which is fully incorporated herein by reference. Thus, the engineered, non-naturally occurring gene editing system comprises two regulatory elements, wherein the first regulatory element (a) operable in a plant cell operably linked to at least one nucleotide sequence encoding a CRISPR-Cas system guide RNA (gRNA) that hybridizes with the target sequence in the plant, and a second regulatory element (b) operable in a plant cell operably linked to a nucleotide sequence encoding a Type-II CRISPR-associated nuclease, wherein components (a) and (b) are located on same or different vectors of the system, whereby the guide RNA targets the target sequence and the CRISPR-associated nuclease cleaves the DNA molecule, thus altering the expression of a gene product in a plant. It should be noted that the CRISPR-associated nuclease and the guide RNA do not naturally occur together.

[0194] In addition, as described above, point mutations which activate a gene-of-interest and/or which result in over-expression of a polypeptide-of-interest can be also introduced into plants by means of genome editing. Such mutation can be for example, deletions of repressor sequences which result in activation of the gene-of-interest; and/or mutations which insert nucleotides and result in activation of regulatory sequences such as promoters and/or enhancers.

[0195] Meganucleases—Meganucleases are commonly grouped into four families: the LAGLIDADG family, the GIY-YIG family, the His-Cys box family and the HNH family. These families are characterized by structural motifs, which affect catalytic activity and recognition sequence. For instance, members of the LAGLIDADG family are characterized by having either one or two copies of the conserved LAGLIDADG motif. The four families of meganucleases are widely separated from one another with respect to conserved structural elements and, consequently, DNA recognition sequence specificity and catalytic activity. Meganucleases are found commonly in microbial species and have the unique property of having very long recognition sequences (>14 bp) thus making them naturally very specific for cutting at a desired location. This can be exploited to make site-specific double-stranded breaks in genome editing. One of skill in the art can use these naturally occurring meganucleases, however the number of such naturally occurring meganucleases is limited. To overcome this challenge, mutagenesis and high throughput screening methods have been used to create meganuclease variants that recognize unique sequences. For example, various meganucleases have been fused to create hybrid enzymes that recognize a new sequence. Alternatively, DNA interacting amino acids of the meganuclease can be altered to design sequence specific meganucleases (see e.g., U.S. Pat. No. 8,021,867). Meganucleases can be designed using the methods described in e.g., Certo, M T et al. Nature Methods (2012) 9:073-975; U.S. Pat. Nos. 8,304,222; 8,021,867; 8,119,381; 8,124,369; 8,129,134; 8,133,697; 8,143,015; 8,143,016; 8,148,098; or 8,163,514, the contents of each are incorporated herein by reference in their entirety. Alternatively, meganucleases with site specific cutting characteristics can be obtained using commercially available technologies e.g., Precision Biosciences' Directed Nuclease Editor™ genome editing technology.

[0196] ZFNs and TALENs—Two distinct classes of engineered nucleases, zinc-finger nucleases (ZFNs) and transcription activator-like effector nucleases (TALENs), have both proven to be effective at producing targeted double-stranded breaks (Christian et al., 2010; Kim et al., 1996; Li et al., 2011; Mahfouz et al., 2011; Miller et al., 2010).

[0197] Basically, ZFNs and TALENs restriction endonuclease technology utilizes a non-specific DNA cutting enzyme which is linked to a specific DNA binding domain (either a series of zinc finger domains or TALE repeats, respectively). Typically a restriction enzyme whose DNA recognition site and cleaving site are separate from each other is selected. The cleaving portion is separated and then linked to a DNA binding domain, thereby yielding an endonuclease with very high specificity for a desired sequence. An exemplary restriction enzyme with such properties is Fokl. Additionally Fokl has the advantage of requiring dimerization to have nuclease activity and this means the specificity increases dramatically as each nuclease partner recognizes a unique DNA sequence. To enhance this effect, Fokl nucleases have been engineered that can only function as heterodimers and have increased catalytic activity. The heterodimer functioning nucleases avoid the possibility of unwanted homodimer activity and thus increase specificity of the double-stranded break.

[0198] Thus, for example to target a specific site, ZFNs and TALENs are constructed as nuclease pairs, with each member of the pair designed to bind adjacent sequences at the targeted site. Upon transient expression in cells, the nucleases bind to their target sites and the FokI domains heterodimerize to create a double-stranded break. Repair of these double-stranded breaks through the nonhomologous end-joining (NHEJ) pathway most often results in small deletions or small sequence insertions. Since each repair made by NHEJ is unique, the use of a single nuclease pair can produce an allelic series with a range of different deletions at the target site. The deletions typically range anywhere from a few base pairs to a few hundred base pairs in length, but larger deletions have successfully been generated in cell culture by using two pairs of nucleases simultaneously (Carlson et al., 2012; Lee et al., 2010). In addition, when a fragment of DNA with homology to the targeted region is introduced in conjunction with the nuclease pair, the double-stranded break can be repaired via homology directed repair to generate specific modifications (Li et al., 2011; Miller et al., 2010; Urnov et al., 2005).

[0199] Although the nuclease portions of both ZFNs and TALENs have similar properties, the difference between these engineered nucleases is in their DNA recognition peptide. ZFNs rely on Cys2-His2 zinc fingers and TALENs on TALEs. Both of these DNA recognizing peptide domains have the characteristic that they are naturally found in combinations in their proteins. Cys2-His2 Zinc fingers typically found in repeats that are 3 bp apart and are found in diverse combinations in a variety of nucleic acid interacting proteins. TALEs on the other hand are found in repeats with a one-to-one recognition ratio between the amino acids and the recognized nucleotide pairs. Because both zinc fingers and TALEs happen in repeated patterns, different combinations can be tried to create a wide variety of sequence specificities. Approaches for making site-specific zinc finger endonucleases include, e.g., modular assembly (where Zinc fingers correlated with a triplet sequence are attached in a row to cover the required sequence), OPEN (low-stringency selection of peptide domains vs. triplet nucleotides followed by high-stringency selections of peptide combination vs. the final target in bacterial systems), and bacterial one-hybrid screening of zinc finger libraries, among others. ZFNs can also be designed and obtained commercially from e.g., Sangamo Biosciences™ (Richmond, Calif.).

[0200] Method for designing and obtaining TALENs are described in e.g. Reyon et al. Nature Biotechnology 2012 May; 30(5):460-5; Miller et al. Nat Biotechnol. (2011) 29: 143-148; Cermak et al. Nucleic Acids Research (2011) 39 (12): e82 and Zhang et al. Nature Biotechnology (2011) 29 (2): 149-53. A recently developed web-based program named Mojo Hand was introduced by Mayo Clinic for designing TAL and TALEN constructs for genome editing applications (can be accessed through www(dot)talendesign(dot)org). TALEN can also be designed and obtained commercially from e.g., Sangamo Biosciences™ (Richmond, Calif.).

[0201] The CRIPSR/Cas system for genome editing contains two distinct components: a gRNA and an endonuclease e.g. Cas9.

[0202] The gRNA is typically a 20 nucleotide sequence encoding a combination of the target homologous sequence (crRNA) and the endogenous bacterial RNA that links the crRNA to the Cas9 nuclease (tracrRNA) in a single chimeric transcript. The gRNA/Cas9 complex is recruited to the target sequence by the base-pairing between the gRNA sequence and the complement genomic DNA. For successful binding of Cas9, the genomic target sequence must also contain the correct Protospacer Adjacent Motif (PAM) sequence immediately following the target sequence. The binding of the gRNA/Cas9 complex localizes the Cas9 to the genomic target sequence so that the Cas9 can cut both strands of the DNA causing a double-strand break. Just as with ZFNs and TALENs, the double-stranded brakes produced by CRISPR/Cas can undergo homologous recombination or NHEJ.

[0203] The Cas9 nuclease has two functional domains: RuvC and HNH, each cutting a different DNA strand. When both of these domains are active, the Cas9 causes double strand breaks in the genomic DNA.

[0204] A significant advantage of CRISPR/Cas is that the high efficiency of this system coupled with the ability to easily create synthetic gRNAs enables multiple genes to be targeted simultaneously. In addition, the majority of cells carrying the mutation present biallelic mutations in the targeted genes.

[0205] However, apparent flexibility in the base-pairing interactions between the gRNA sequence and the genomic DNA target sequence allows imperfect matches to the target sequence to be cut by Cas9.

[0206] Modified versions of the Cas9 enzyme containing a single inactive catalytic domain, either RuvC- or HNH-, are called ‘nickases’. With only one active nuclease domain, the Cas9 nickase cuts only one strand of the target DNA, creating a single-strand break or ‘nick’. A single-strand break, or nick, is normally quickly repaired through the HDR pathway, using the intact complementary DNA strand as the template. However, two proximal, opposite strand nicks introduced by a Cas9 nickase are treated as a double-strand break, in what is often referred to as a ‘double nick’ CRISPR system. A double-nick can be repaired by either NHEJ or HDR depending on the desired effect on the gene target. Thus, if specificity and reduced off-target effects are crucial, using the Cas9 nickase to create a double-nick by designing two gRNAs with target sequences in close proximity and on opposite strands of the genomic DNA would decrease off-target effect as either gRNA alone will result in nicks that will not change the genomic DNA.

[0207] Modified versions of the Cas9 enzyme containing two inactive catalytic domains (dead Cas9, or dCas9) have no nuclease activity while still able to bind to DNA based on gRNA specificity. The dCas9 can be utilized as a platform for DNA transcriptional regulators to activate or repress gene expression by fusing the inactive enzyme to known regulatory domains. For example, the binding of dCas9 alone to a target sequence in genomic DNA can interfere with gene transcription.

[0208] There are a number of publically available tools available to help choose and/or design target sequences as well as lists of bioinformatically determined unique gRNAs for different genes in different species such as the Feng Zhang lab's Target Finder, the Michael Boutros lab's Target Finder (E-CRISP), the RGEN Tools: Cas-OFFinder, the CasFinder: Flexible algorithm for identifying specific Cas9 targets in genomes and the CRISPR Optimal Target Finder.

[0209] In order to use the CRISPR system, both gRNA and Cas9 should be expressed in a target cell. The insertion vector can contain both cassettes on a single plasmid or the cassettes are expressed from two separate plasmids. CRISPR plasmids are commercially available such as the px330 plasmid from Addgene.

[0210] “Hit and run” or “in-out”—involves a two-step recombination procedure. In the first step, an insertion-type vector containing a dual positive/negative selectable marker cassette is used to introduce the desired sequence alteration. The insertion vector contains a single continuous region of homology to the targeted locus and is modified to carry the mutation of interest. This targeting construct is linearized with a restriction enzyme at a one site within the region of homology, electroporated into the cells, and positive selection is performed to isolate homologous recombinants. These homologous recombinants contain a local duplication that is separated by intervening vector sequence, including the selection cassette. In the second step, targeted clones are subjected to negative selection to identify cells that have lost the selection cassette via intrachromosomal recombination between the duplicated sequences. The local recombination event removes the duplication and, depending on the site of recombination, the allele either retains the introduced mutation or reverts to wild type. The end result is the introduction of the desired modification without the retention of any exogenous sequences.

[0211] The “double-replacement” or “tag and exchange” strategy—involves a two-step selection procedure similar to the hit and run approach, but requires the use of two different targeting constructs. In the first step, a standard targeting vector with 3′ and 5′ homology arms is used to insert a dual positive/negative selectable cassette near the location where the mutation is to be introduced. After electroporation and positive selection, homologously targeted clones are identified. Next, a second targeting vector that contains a region of homology with the desired mutation is electroporated into targeted clones, and negative selection is applied to remove the selection cassette and introduce the mutation. The final allele contains the desired mutation while eliminating unwanted exogenous sequences.

[0212] Site-Specific Recombinases—The Cre recombinase derived from the P1 bacteriophage and Flp recombinase derived from the yeast Saccharomyces cerevisiae are site-specific DNA recombinases each recognizing a unique 34 base pair DNA sequence (termed “Lox” and “FRT”, respectively) and sequences that are flanked with either Lox sites or FRT sites can be readily removed via site-specific recombination upon expression of Cre or Flp recombinase, respectively. For example, the Lox sequence is composed of an asymmetric eight base pair spacer region flanked by 13 base pair inverted repeats. Cre recombines the 34 base pair lox DNA sequence by binding to the 13 base pair inverted repeats and catalyzing strand cleavage and religation within the spacer region. The staggered DNA cuts made by Cre in the spacer region are separated by 6 base pairs to give an overlap region that acts as a homology sensor to ensure that only recombination sites having the same overlap region recombine.

[0213] Basically, the site specific recombinase system offers means for the removal of selection cassettes after homologous recombination. This system also allows for the generation of conditional altered alleles that can be inactivated or activated in a temporal or tissue-specific manner. Of note, the Cre and Flp recombinases leave behind a Lox or FRT “scar” of 34 base pairs. The Lox or FRT sites that remain are typically left behind in an intron or 3′ UTR of the modified locus, and current evidence suggests that these sites usually do not interfere significantly with gene function.

[0214] Thus, Cre/Lox and Flp/FRT recombination involves introduction of a targeting vector with 3′ and 5′ homology arms containing the mutation of interest, two Lox or FRT sequences and typically a selectable cassette placed between the two Lox or FRT sequences. Positive selection is applied and homologous recombinants that contain targeted mutation are identified. Transient expression of Cre or Flp in conjunction with negative selection results in the excision of the selection cassette and selects for cells where the cassette has been lost. The final targeted allele contains the Lox or FRT scar of exogenous sequences.

[0215] Transposases—As used herein, the term “transposase” refers to an enzyme that binds to the ends of a transposon and catalyzes the movement of the transposon to another part of the genome.

[0216] As used herein the term “transposon” refers to a mobile genetic element comprising a nucleotide sequence which can move around to different positions within the genome of a single cell. In the process the transposon can cause mutations and/or change the amount of a DNA in the genome of the cell.

[0217] A number of transposon systems that are able to also transpose in cells e.g. vertebrates have been isolated or designed, such as Sleeping Beauty [Izsvák and Ivics Molecular Therapy (2004) 9, 147-156], piggyBac [Wilson et al. Molecular Therapy (2007) 15, 139-145], Tol2 [Kawakami et al. PNAS (2000) 97 (21): 11403-11408] or Frog Prince [Miskey et al. Nucleic Acids Res. Dec. 1, (2003) 31(23): 6873-6881]. Generally, DNA transposons translocate from one DNA site to another in a simple, cut-and-paste manner. Each of these elements has their own advantages, for example, Sleeping Beauty is particularly useful in region-specific mutagenesis, whereas Tol2 has the highest tendency to integrate into expressed genes. Hyperactive systems are available for Sleeping Beauty and piggyBac. Most importantly, these transposons have distinct target site preferences, and can therefore introduce sequence alterations in overlapping, but distinct sets of genes. Therefore, to achieve the best possible coverage of genes, the use of more than one element is particularly preferred. The basic mechanism is shared between the different transposases, therefore we will describe piggyBac (PB) as an example.

[0218] PB is a 2.5 kb insect transposon originally isolated from the cabbage looper moth, Trichoplusia ni. The PB transposon consists of asymmetric terminal repeat sequences that flank a transposase, PBase. PBase recognizes the terminal repeats and induces transposition via a “cut-and-paste” based mechanism, and preferentially transposes into the host genome at the tetranucleotide sequence TTAA. Upon insertion, the TTAA target site is duplicated such that the PB transposon is flanked by this tetranucleotide sequence. When mobilized, PB typically excises itself precisely to reestablish a single TTAA site, thereby restoring the host sequence to its pretransposon state. After excision, PB can transpose into a new location or be permanently lost from the genome.

[0219] Typically, the transposase system offers an alternative means for the removal of selection cassettes after homologous recombination quit similar to the use Cre/Lox or Flp/FRT. Thus, for example, the PB transposase system involves introduction of a targeting vector with 3′ and 5′ homology arms containing the mutation of interest, two PB terminal repeat sequences at the site of an endogenous TTAA sequence and a selection cassette placed between PB terminal repeat sequences. Positive selection is applied and homologous recombinants that contain targeted mutation are identified. Transient expression of PBase removes in conjunction with negative selection results in the excision of the selection cassette and selects for cells where the cassette has been lost. The final targeted allele contains the introduced mutation with no exogenous sequences.

[0220] For PB to be useful for the introduction of sequence alterations, there must be a native TTAA site in relatively close proximity to the location where a particular mutation is to be inserted.

[0221] Genome editing using recombinant adeno-associated virus (rAAV) platform—this genome-editing platform is based on rAAV vectors which enable insertion, deletion or substitution of DNA sequences in the genomes of live mammalian cells. The rAAV genome is a single-stranded deoxyribonucleic acid (ssDNA) molecule, either positive- or negative-sensed, which is about 4.7 kb long. These single-stranded DNA viral vectors have high transduction rates and have a unique property of stimulating endogenous homologous recombination in the absence of double-strand DNA breaks in the genome. One of skill in the art can design a rAAV vector to target a desired genomic locus and perform both gross and/or subtle endogenous gene alterations in a cell. rAAV genome editing has the advantage in that it targets a single allele and does not result in any off-target genomic alterations. rAAV genome editing technology is commercially available, for example, the rAAV GENESIS™ system from Horizon™ (Cambridge, UK).

[0222] Methods for qualifying efficacy and detecting sequence alteration are well known in the art and include, but not limited to, DNA sequencing, electrophoresis, an enzyme-based mismatch detection assay and a hybridization assay such as PCR, RT-PCR, RNase protection, in-situ hybridization, primer extension, Southern blot, Northern Blot and dot blot analysis.

[0223] Sequence alterations in a specific gene can also be determined at the protein level using e.g. chromatography, electrophoretic methods, immunodetection assays such as ELISA and western blot analysis and immunohistochemistry.

[0224] In addition, one ordinarily skilled in the art can readily design a knock-in/knock-out construct including positive and/or negative selection markers for efficiently selecting transformed cells that underwent a homologous recombination event with the construct. Positive selection provides a means to enrich the population of clones that have taken up foreign DNA. Non-limiting examples of such positive markers include glutamine synthetase, dihydrofolate reductase (DHFR), markers that confer antibiotic resistance, such as neomycin, hygromycin, puromycin, and blasticidin S resistance cassettes. Negative selection markers are necessary to select against random integrations and/or elimination of a marker sequence (e.g. positive marker). Non-limiting examples of such negative markers include the herpes simplex-thymidine kinase (HSV-TK) which converts ganciclovir (GCV) into a cytotoxic nucleoside analog, hypoxanthine phosphoribosyltransferase (HPRT) and adenine phosphoribosytransferase (ARPT).

[0225] According to some embodiments of the invention, there is provided a plant cell exogenously expressing the polynucleotide of some embodiments of the invention, the nucleic acid construct of some embodiments of the invention and/or the polypeptide of some embodiments of the invention.

[0226] According to some embodiments of the invention, modulating expression t is effected by transforming one or more cells of the plant with the polynucleotide, followed by generating a mature plant from the transformed cells and cultivating the mature plant under conditions suitable for modulating the exogenous polynucleotide within the mature plant.

[0227] According to some embodiments of the invention, the transformation is effected by introducing to the plant cell a nucleic acid construct which includes the exogenous polynucleotide of some embodiments of the invention and at least one promoter for directing transcription of the exogenous polynucleotide in a host cell (a plant cell). Further details of suitable transformation approaches are provided hereinbelow.

[0228] As mentioned, the nucleic acid construct according to some embodiments of the invention comprises a promoter sequence and the isolated polynucleotide of some embodiments of the invention.

[0229] According to some embodiments of the invention, the isolated polynucleotide is operably linked to the promoter sequence.

[0230] A coding nucleic acid sequence is “operably linked” to a regulatory sequence (e.g., promoter) if the regulatory sequence is capable of exerting a regulatory effect on the coding sequence linked thereto.

[0231] As used herein, the term “promoter” refers to a region of DNA which lies upstream of the transcriptional initiation site of a gene to which RNA polymerase binds to initiate transcription of RNA. The promoter controls where (e.g., which portion of a plant) and/or when (e.g., at which stage or condition in the lifetime of an organism) the gene is expressed.

[0232] According to some embodiments of the invention, the promoter is heterologous to the isolated polynucleotide and/or to the host cell.

[0233] As used herein the phrase “heterologous promoter” refers to a promoter from a different species with respect to the species from which the polynucleotide is isolated, or to a promoter from the same species but from a different gene locus within the plant's genome with respect to the gene locus from which the polynucleotide sequence is isolated.

[0234] According to some embodiments of the invention, the isolated polynucleotide is heterologous to the plant cell (e.g., the polynucleotide is derived from a different plant species when compared to the plant cell, thus the isolated polynucleotide and the plant cell are not from the same plant species).

[0235] Any suitable promoter sequence can be used by the nucleic acid construct of the present invention. Preferably the promoter is a constitutive promoter, a tissue-specific, or a stress-inducible promoter.

[0236] According to some embodiments of the invention, the promoter is a plant promoter, which is suitable for expression of the exogenous polynucleotide in a plant cell.

[0237] The nucleic acid construct of some embodiments of the invention can be utilized to transform plant cells.

[0238] Constructs useful in the methods according to some embodiments of the invention may be constructed using recombinant DNA technology well known to persons skilled in the art. The gene constructs may be inserted into vectors, which may be commercially available, suitable for transforming into plants and suitable for expression of the gene of interest in the transformed cells. The genetic construct can be an expression vector wherein said nucleic acid sequence is operably linked to one or more regulatory sequences allowing expression in the plant cells.

[0239] In a particular embodiment of some embodiments of the invention the regulatory sequence is a plant-expressible promoter.

[0240] As used herein the phrase “plant-expressible” refers to a promoter sequence, including any additional regulatory elements added thereto or contained therein, is at least capable of inducing, conferring, activating or enhancing expression in a plant cell, tissue or organ, preferably a monocotyledonous or dicotyledonous plant cell, tissue, or organ. Examples of preferred promoters useful for the methods of some embodiments of the invention are presented in Table I, II, III.

TABLE I
Exemplary constitutive promoters for use in the
performance of some embodiments of the invention

| | Expression | |
|---|---|---|
| Gene Source | Pattern | Reference |
| Actin | constitutive | McElroy et al., Plant Cell, |
| | | 2:163-171, 1990 |
| CAMV 35S | constitutive | Odell et al., Nature, |
| | | 313:810-812, 1985 |
| CaMV 19S | constitutive | Nilsson et al., Physiol. |
| | | Plant 100:456-462, 1997 |
| GOS2 | constitutive | de Pater et al., Plant J |
| | | Nov;2(6):837-44, 1992 |
| ubiquitin | constitutive | Christensen et al., Plant |
| | | Mol. Biol. 18:675-689, 1992 |
| Rice cyclophilin | constitutive | Bucholz et al., Plant Mol |
| | | Biol. 25(5):837-43, 1994 |
| Maize H3 histone | constitutive | Lepetit et al., Mol. Gen. |
| | | Genet. 231:276-285, 1992 |
| Actin 2 | constitutive | An et al., Plant J. |
| | | 10(1);107-121, 1996 |

TABLE II
Exemplary seed-preferred promoters for use in the performance of some embodiments of the invention

| | Expression | |
|---|---|---|
| Gene Source | Pattern | Reference |
| Seed specific genes | seed | Simon, et al., Plant Mol. Biol. 5. 191, 1985; |
| | | Scofield, et al., J. Biol. Chem. 262:12202, 1987.; |
| | | Baszczynski, et al., Plant Mol. Biol. 14:633, 1990. |
| Brazil Nut albumin | seed | Pearson' et al., Plant Mol. Biol. 18:235-245, 1992. |
| legumin | seed | Ellis, et al. Plant Mol. Biol. 10:203-214, 1988 |
| Glutelin (rice) | seed | Takaiwa, et al., Mol. Gen. Genet. 208:15-22, 1986; |
| | | Takaiwa, et al., FEBS Letts. 221:43-47, 1987 |
| Zein | seed | Matzke et al. Plant Mol Biol, 143).323-32 1990 |
| napA | seed | Stalberg, et al., Planta 199:515-519, 1996 |
| wheat LMW and HMW, glutenin-1 | endosperm | Mol Gen Genet 216:81-15 and 18-86, 1989; |
| | | NAR 17:461-2, |
| Wheat SPA | seed | Albanietal, Plant Cell, 9:171-184, 1997 |
| wheat a, b and g gliadins | endosperm | EMBO3:1409-15, 1984 |
| Barley ltrl promoter | endosperm | |
| barley B1, C, D hordein | endosperm | Theor Appl Gen 98:1253-62, 1999; Plant J 4:343-55, |
| | | 1993; Mol Gen Genet 250:750-60, 1996 |
| Barley DOF | endosperm | Mena et al., The Plant Journal, 116(1):53-62, 1998 |
| Biz2 | endosperm | EP99106056.7 |
| Synthetic promoter | endosperm | Vicente-Carbajosa et al., Plant J. 13:629-640, 1998 |
| rice prolamin NRP33 | endosperm | Wu et al., Plant Cell Physiology 39(8) 885-889, 1998 |
| rice -globulin Glb-1 | endosperm | Wu et al., Plant Cell Physiology 398) 885-889, 1998 |
| rice OSH1 | emryo | Sato et al., Proc. Nati. Acad. Sci. USA, 93:8117-8122 |
| rice alpha-globulin REB/OHP-1 | endosperm | Nakase et al. Plant Mol. Biol. 33:513-S22, 1997 |
| rice ADP-glucose PP | endosperm | Trans Res 6:157-68, 1997 |
| maize ESR gene family | endosperm | Plant J 12:235-46, 1997 |
| sorgum gamma- kafirin | endosperm | PMB 32:1029-35, 1996 |
| KNOX | emryo | Postma-Haarsma et al., Plant Mol. Biol. 39:257-71, 1999 |
| rice oleosin | Embryo and aleuton | Wu et at, J. Biochem., 123:386, 1998 |
| sunflower oleosin | Seed (embryo and dry seed) | Cummins, et al., Plant Mol. Biol. 19:873-876, 1992 |

TABLE III
Exemplary flower-specific promoters for
use in the performance of the invention

| | Expression | |
|---|---|---|
| Gene Source | Pattern | Reference |
| AtPRP4 | flowers | www(dot)salus(dot) |
| | | Medium(dot)edu/mmg/tierney/html |
| chalene synthase | flowers | Van der Meer, et al., Plant |
| (chsA) | | Mol. Biol. 15, 95-109, 1990. |
| LAT52 | anther | Twell et al. Mol. Gen |
| | | Genet. 217:240-245 (1989) |
| apetala- 3 | flowers | |

[0241] Nucleic acid sequences of the polypeptides of some embodiments of the invention may be optimized for plant expression. Examples of such sequence modifications include, but are not limited to, an altered G/C content to more closely approach that typically found in the plant species of interest, and the removal of codons atypically found in the plant species commonly referred to as codon optimization.

[0242] Plant cells may be transformed stably or transiently with the nucleic acid constructs of some embodiments of the invention. In stable transformation, the nucleic acid molecule of some embodiments of the invention is integrated into the plant genome and as such it represents a stable and inherited trait. In transient transformation, the nucleic acid molecule is expressed by the cell transformed but it is not integrated into the genome and as such it represents a transient trait.

[0243] There are various methods of introducing foreign genes into both monocotyledonous and dicotyledonous plants (Potrykus, I., Annu. Rev. Plant. Physiol., Plant. Mol. Biol. (1991) 42:205-225; Shimamoto et al., Nature (1989) 338:274-276).

[0244] The principle methods of causing stable integration of exogenous DNA into plant genomic DNA include two main approaches:

[0245] (i) Agrobacterium-mediated gene transfer: Klee et al. (1987) Annu. Rev. Plant Physiol. 38:467-486; Klee and Rogers in Cell Culture and Somatic Cell Genetics of Plants, Vol. 6, Molecular Biology of Plant Nuclear Genes, eds. Schell, J., and Vasil, L. K., Academic Publishers, San Diego, Calif. (1989) p. 2-25; Gatenby, in Plant Biotechnology, eds. Kung, S. and Arntzen, C. J., Butterworth Publishers, Boston, Mass. (1989) p. 93-112.

[0246] (ii) direct DNA uptake: Paszkowski et al., in Cell Culture and Somatic Cell Genetics of Plants, Vol. 6, Molecular Biology of Plant Nuclear Genes eds. Schell, J., and Vasil, L. K., Academic Publishers, San Diego, Calif. (1989) p. 52-68; including methods for direct uptake of DNA into protoplasts, Toriyama, K. et al. (1988) Bio/Technology 6:1072-1074. DNA uptake induced by brief electric shock of plant cells: Zhang et al. Plant Cell Rep. (1988) 7:379-384. Fromm et al. Nature (1986) 319:791-793. DNA injection into plant cells or tissues by particle bombardment, Klein et al. Bio/Technology (1988) 6:559-563; McCabe et al. Bio/Technology (1988) 6:923-926; Sanford, Physiol. Plant. (1990) 79:206-209; by the use of micropipette systems: Neuhaus et al., Theor. Appl. Genet. (1987) 75:30-36; Neuhaus and Spangenberg, Physiol. Plant. (1990) 79:213-217; glass fibers or silicon carbide whisker transformation of cell cultures, embryos or callus tissue, U.S. Pat. No. 5,464,765 or by the direct incubation of DNA with germinating pollen, DeWet et al. in Experimental Manipulation of Ovule Tissue, eds. Chapman, G. P. and Mantell, S. H. and Daniels, W. Longman, London, (1985) p. 197-209; and Ohta, Proc. Natl. Acad. Sci. USA (1986) 83:715-719.

[0247] The Agrobacterium system includes the use of plasmid vectors that contain defined DNA segments that integrate into the plant genomic DNA. Methods of inoculation of the plant tissue vary depending upon the plant species and the Agrobacterium delivery system. A widely used approach is the leaf disc procedure which can be performed with any tissue explant that provides a good source for initiation of whole plant differentiation. Horsch et al. in Plant Molecular Biology Manual A5, Kluwer Academic Publishers, Dordrecht (1988) p. 1-9. A supplementary approach employs the Agrobacterium delivery system in combination with vacuum infiltration. The Agrobacterium system is especially viable in the creation of transgenic dicotyledenous plants.

[0248] There are various methods of direct DNA transfer into plant cells. In electroporation, the protoplasts are briefly exposed to a strong electric field. In microinjection, the DNA is mechanically injected directly into the cells using very small micropipettes. In microparticle bombardment, the DNA is adsorbed on microprojectiles such as magnesium sulfate crystals or tungsten particles, and the microprojectiles are physically accelerated into cells or plant tissues.

[0249] Following stable transformation plant propagation is exercised. The most common method of plant propagation is by seed. Regeneration by seed propagation, however, has the deficiency that due to heterozygosity there is a lack of uniformity in the crop, since seeds are produced by plants according to the genetic variances governed by Mendelian rules. Basically, each seed is genetically different and each will grow with its own specific traits. Therefore, it is preferred that the transformed plant be produced such that the regenerated plant has the identical traits and characteristics of the parent transgenic plant. Therefore, it is preferred that the transformed plant be regenerated by micropropagation which provides a rapid, consistent reproduction of the transformed plants.

[0250] Micropropagation is a process of growing new generation plants from a single piece of tissue that has been excised from a selected parent plant or cultivar. This process permits the mass reproduction of plants having the preferred tissue expressing the fusion protein. The new generation plants which are produced are genetically identical to, and have all of the characteristics of, the original plant. Micropropagation allows mass production of quality plant material in a short period of time and offers a rapid multiplication of selected cultivars in the preservation of the characteristics of the original transgenic or transformed plant. The advantages of cloning plants are the speed of plant multiplication and the quality and uniformity of plants produced.

[0251] Micropropagation is a multi-stage procedure that requires alteration of culture medium or growth conditions between stages. Thus, the micropropagation process involves four basic stages: Stage one, initial tissue culturing; stage two, tissue culture multiplication; stage three, differentiation and plant formation; and stage four, greenhouse culturing and hardening. During stage one, initial tissue culturing, the tissue culture is established and certified contaminant-free. During stage two, the initial tissue culture is multiplied until a sufficient number of tissue samples are produced to meet production goals. During stage three, the tissue samples grown in stage two are divided and grown into individual plantlets. At stage four, the transformed plantlets are transferred to a greenhouse for hardening where the plants' tolerance to light is gradually increased so that it can be grown in the natural environment.

[0252] Although stable transformation is presently preferred, transient transformation of leaf cells, meristematic cells or the whole plant is also envisaged by some embodiments of the invention.

[0253] Transient transformation can be effected by any of the direct DNA transfer methods described above or by viral infection using modified plant viruses.

[0254] Viruses that have been shown to be useful for the transformation of plant hosts include CaMV, TMV and BV. Transformation of plants using plant viruses is described in U.S. Pat. No. 4,855,237 (BGV), EP-A 67,553 (TMV), Japanese Published Application No. 63-14693 (TMV), EPA 194,809 (BV), EPA 278,667 (BV); and Gluzman, Y. et al., Communications in Molecular Biology: Viral Vectors, Cold Spring Harbor Laboratory, New York, pp. 172-189 (1988). Pseudovirus particles for use in expressing foreign DNA in many hosts, including plants, is described in WO 87/06261.

[0255] Construction of plant RNA viruses for the introduction and expression of non-viral exogenous nucleic acid sequences in plants is demonstrated by the above references as well as by Dawson, W. O. et al., Virology (1989) 172:285-292; Takamatsu et al. EMBO J. (1987) 6:307-311; French et al. Science (1986) 231:1294-1297; and Takamatsu et al. FEBS Letters (1990) 269:73-76.

[0256] When the virus is a DNA virus, suitable modifications can be made to the virus itself. Alternatively, the virus can first be cloned into a bacterial plasmid for ease of constructing the desired viral vector with the foreign DNA. The virus can then be excised from the plasmid. If the virus is a DNA virus, a bacterial origin of replication can be attached to the viral DNA, which is then replicated by the bacteria. Transcription and translation of this DNA will produce the coat protein which will encapsidate the viral DNA. If the virus is an RNA virus, the virus is generally cloned as a cDNA and inserted into a plasmid. The plasmid is then used to make all of the constructions. The RNA virus is then produced by transcribing the viral sequence of the plasmid and translation of the viral genes to produce the coat protein(s) which encapsidate the viral RNA.

[0257] Construction of plant RNA viruses for the introduction and expression in plants of non-viral exogenous nucleic acid sequences such as those included in the construct of some embodiments of the invention is demonstrated by the above references as well as in U.S. Pat. No. 5,316,931.

[0258] In one embodiment, a plant viral nucleic acid is provided in which the native coat protein coding sequence has been deleted from a viral nucleic acid, a non-native plant viral coat protein coding sequence and a non-native promoter, preferably the subgenomic promoter of the non-native coat protein coding sequence, capable of expression in the plant host, packaging of the recombinant plant viral nucleic acid, and ensuring a systemic infection of the host by the recombinant plant viral nucleic acid, has been inserted. Alternatively, the coat protein gene may be inactivated by insertion of the non-native nucleic acid sequence within it, such that a protein is produced. The recombinant plant viral nucleic acid may contain one or more additional non-native subgenomic promoters. Each non-native subgenomic promoter is capable of transcribing or expressing adjacent genes or nucleic acid sequences in the plant host and incapable of recombination with each other and with native subgenomic promoters. Non-native (foreign) nucleic acid sequences may be inserted adjacent the native plant viral subgenomic promoter or the native and a non-native plant viral subgenomic promoters if more than one nucleic acid sequence is included. The non-native nucleic acid sequences are transcribed or expressed in the host plant under control of the subgenomic promoter to produce the desired products.

[0259] In a second embodiment, a recombinant plant viral nucleic acid is provided as in the first embodiment except that the native coat protein coding sequence is placed adjacent one of the non-native coat protein subgenomic promoters instead of a non-native coat protein coding sequence.

[0260] In a third embodiment, a recombinant plant viral nucleic acid is provided in which the native coat protein gene is adjacent its subgenomic promoter and one or more non-native subgenomic promoters have been inserted into the viral nucleic acid. The inserted non-native subgenomic promoters are capable of transcribing or expressing adjacent genes in a plant host and are incapable of recombination with each other and with native subgenomic promoters. Non-native nucleic acid sequences may be inserted adjacent the non-native subgenomic plant viral promoters such that said sequences are transcribed or expressed in the host plant under control of the subgenomic promoters to produce the desired product.

[0261] In a fourth embodiment, a recombinant plant viral nucleic acid is provided as in the third embodiment except that the native coat protein coding sequence is replaced by a non-native coat protein coding sequence.

[0262] The viral vectors are encapsidated by the coat proteins encoded by the recombinant plant viral nucleic acid to produce a recombinant plant virus. The recombinant plant viral nucleic acid or recombinant plant virus is used to infect appropriate host plants. The recombinant plant viral nucleic acid is capable of replication in the host, systemic spread in the host, and transcription or expression of foreign gene(s) (isolated nucleic acid) in the host to produce the desired protein.

[0263] In addition to the above, the nucleic acid molecule of some embodiments of the invention can also be introduced into a chloroplast genome thereby enabling chloroplast expression.

[0264] A technique for introducing exogenous nucleic acid sequences to the genome of the chloroplasts is known. This technique involves the following procedures. First, plant cells are chemically treated so as to reduce the number of chloroplasts per cell to about one. Then, the exogenous nucleic acid is introduced via particle bombardment into the cells with the aim of introducing at least one exogenous nucleic acid molecule into the chloroplasts. The exogenous nucleic acid is selected such that it is integratable into the chloroplast's genome via homologous recombination which is readily effected by enzymes inherent to the chloroplast. To this end, the exogenous nucleic acid includes, in addition to a gene of interest, at least one nucleic acid stretch which is derived from the chloroplast's genome. In addition, the exogenous nucleic acid includes a selectable marker, which serves by sequential selection procedures to ascertain that all or substantially all of the copies of the chloroplast genomes following such selection will include the exogenous nucleic acid. Further details relating to this technique are found in U.S. Pat. Nos. 4,945,050; and 5,693,507 which are incorporated herein by reference. A polypeptide can thus be produced by the protein expression system of the chloroplast and become integrated into the chloroplast's inner membrane.

[0265] Once cells, plants or parts of having been modified to upregulate or downregulate the gene of interest, these are selected to find the genomic event and/or the requested phenotype.

[0266] Thus, according to an aspect of the invention there is provided a method of selecting a plant for a cannabinoid profile, the method comprising analyzing in the plant or part thereof presence of a nucleic acid sequence at least 95% identical to SEQ ID NO: 87-101 and 104-173 or amino acid sequence at least 95% identical to SEQ ID NO: 1-15 and 18-86, wherein presence or absence of the nucleic acid sequence or amino acid sequence is indicative of the cannabinoid profile.

[0267] Marker-assisted selection (MAS) can be used to identify the modification e.g., presence of an Indel following genome editing.

[0268] The sequence information and annotations uncovered by the present teachings can be harnessed in favor of uncovering the requested genotype and/or classical breeding. Thus, sub-sequence data of those polynucleotides described above, can be used as markers for marker assisted selection (MAS), in which a marker is used for indirect selection of a genetic determinant or determinants of a cannabinoid profile. Nucleic acid data of the present teachings (DNA or RNA sequence) may contain or be linked to polymorphic sites or genetic markers on the genome such as restriction fragment length polymorphism (RFLP), microsatellites and single nucleotide polymorphism (SNP), DNA fingerprinting (DFP), amplified fragment length polymorphism (AFLP), expression level polymorphism, polymorphism of the encoded polypeptide and any other polymorphism at the DNA or RNA sequence.

[0269] Alternatively or additionally the method comprises determining the cannabinoid profile or a specific cannabinoid of the plant or part thereof or cell.

[0270] Diverse chromatographic techniques have been used purify cannabinoid compounds from the plant Cannabis sativa. For example, Flash chromatography on silica gel, C8 or C18; preparative HPLC on silica gel columns, C8 or C18; and supercritical CO2 chromatography on silica gel.

[0271] Centrifugation partitioning chromatography (CPC) and counter current chromatography (CCC) can be used, e.g., in the extraction and enrichment of compounds from plant extracts in analytical, semi-preparative and preparative scale. CPC and CCC are a liquid-liquid chromatography methods using a mostly two-phase solvent. It enables an almost loss-free separation of complex mixtures of substances from crude extracts. CPC and CCC are comparable to liquid chromatography (HPLC) which can also be used according to the present teachings.

[0272] Mass spectrometry for quantitative analysis of the profile.

[0273] Specific conditions for HPLC are described below in the Examples section which follows.

[0274] Also provided is a method of producing cannabinoids in a plant part thereof or a cell as described herein, followed by recovering the cannabinoids such as described hereinabove and in the Examples section which follows.

[0275] Optionally, the process involves extraction and/or fractionation using methods which are well known in the art and described for example in U.S. Publ. Nos. 20190134532, 20180292369, 20190214145, 20190201809, and 20180222879, each of which is incorporated herein by reference in its entirety.

[0276] According to a specific embodiment, the extraction can be effected by air dried Cannabis strains extracted in ethanol. Following extraction ethanol is evaporated under reduced pressure at about 38° C. using a rotary evaporator (Laborata 4000; Heidolph Instruments GmbH & Co. KG; Germany). The extracts are reconstituted into a vehicle solution consisting of 1:1:18 ethanol:cremophor (Sigma-Aldrich):saline to a final concentration of 20 mg/ml.

[0277] The Cannabis extract can be injected and measured by HPLC.

[0278] Alternatively or additionally the sample of the extract may be analyzed using LC/MS by the described method for phytocannabinoid profiling.

[0279] Thus, the present procedures, plants, parts thereof and/or cells can yield a cannabinoid extract/preparation which was not described to date and can be used in various applications including medicinal and recreational.

[0280] As used herein the term “about” refers to ±10%.

[0281] The terms “comprises”, “comprising”, “includes”, “including”, “having” and their conjugates mean “including but not limited to”.

[0282] The term “consisting of” means “including and limited to”.

[0283] The term “consisting essentially of” means that the composition, method or structure may include additional ingredients, steps and/or parts, but only if the additional ingredients, steps and/or parts do not materially alter the basic and novel characteristics of the claimed composition, method or structure.

[0284] As used herein, the singular form “a”, “an” and “the” include plural references unless the context clearly dictates otherwise. For example, the term “a compound” or “at least one compound” may include a plurality of compounds, including mixtures thereof.

[0285] Throughout this application, various embodiments of this invention may be presented in a range format. It should be understood that the description in range format is merely for convenience and brevity and should not be construed as an inflexible limitation on the scope of the invention. Accordingly, the description of a range should be considered to have specifically disclosed all the possible subranges as well as individual numerical values within that range. For example, description of a range such as from 1 to 6 should be considered to have specifically disclosed subranges such as from 1 to 3, from 1 to 4, from 1 to 5, from 2 to 4, from 2 to 6, from 3 to 6 etc., as well as individual numbers within that range, for example, 1, 2, 3, 4, 5, and 6. This applies regardless of the breadth of the range.

[0286] Whenever a numerical range is indicated herein, it is meant to include any cited numeral (fractional or integral) within the indicated range. The phrases “ranging/ranges between” a first indicate number and a second indicate number and “ranging/ranges from” a first indicate number “to” a second indicate number are used herein interchangeably and are meant to include the first and second indicated numbers and all the fractional and integral numerals therebetween.

[0287] As used herein the term “method” refers to manners, means, techniques and procedures for accomplishing a given task including, but not limited to, those manners, means, techniques and procedures either known to, or readily developed from known manners, means, techniques and procedures by practitioners of the chemical, pharmacological, biological, biochemical and medical arts.

[0288] As used herein, the term “treating” includes abrogating, substantially inhibiting, slowing or reversing the progression of a condition, substantially ameliorating clinical or aesthetical symptoms of a condition or substantially preventing the appearance of clinical or aesthetical symptoms of a condition.

[0289] When reference is made to particular sequence listings, such reference is to be understood to also encompass sequences that substantially correspond to its complementary sequence as including minor sequence variations, resulting from, e.g., sequencing errors, cloning errors, or other alterations resulting in base substitution, base deletion or base addition, provided that the frequency of such variations is less than 1 in 50 nucleotides, alternatively, less than 1 in 100 nucleotides, alternatively, less than 1 in 200 nucleotides, alternatively, less than 1 in 500 nucleotides, alternatively, less than 1 in 1000 nucleotides, alternatively, less than 1 in 5,000 nucleotides, alternatively, less than 1 in 10,000 nucleotides.

[0290] It is understood that any Sequence Identification Number (SEQ ID NO) disclosed in the instant application can refer to either a DNA sequence or a RNA sequence, depending on the context where that SEQ ID NO is mentioned, even if that SEQ ID NO is expressed only in a DNA sequence format or a RNA sequence format.

[0291] It is appreciated that certain features of the invention, which are, for clarity, described in the context of separate embodiments, may also be provided in combination in a single embodiment. Conversely, various features of the invention, which are, for brevity, described in the context of a single embodiment, may also be provided separately or in any suitable subcombination or as suitable in any other described embodiment of the invention. Certain features described in the context of various embodiments are not to be considered essential features of those embodiments, unless the embodiment is inoperative without those elements.

[0292] Various embodiments and aspects of the present invention as delineated hereinabove and as claimed in the claims section below find experimental support in the following examples.

### EXAMPLES

[0293] Reference is now made to the following examples, which together with the above descriptions illustrate some embodiments of the invention in a non-limiting fashion.

[0294] Generally, the nomenclature used herein and the laboratory procedures utilized in the present invention include molecular, biochemical, microbiological and recombinant DNA techniques. Such techniques are thoroughly explained in the literature. See, for example, “Molecular Cloning: A laboratory Manual” Sambrook et al., (1989); “Current Protocols in Molecular Biology” Volumes I-III Ausubel, R. M., ed. (1994); Ausubel et al., “Current Protocols in Molecular Biology”, John Wiley and Sons, Baltimore, Md. (1989); Perbal, “A Practical Guide to Molecular Cloning”, John Wiley & Sons, New York (1988); Watson et al., “Recombinant DNA”, Scientific American Books, New York; Birren et al. (eds) “Genome Analysis: A Laboratory Manual Series”, Vols. 1-4, Cold Spring Harbor Laboratory Press, New York (1998); methodologies as set forth in U.S. Pat. Nos. 4,666,828; 4,683,202; 4,801,531; 5,192,659 and 5,272,057; “Cell Biology: A Laboratory Handbook”, Volumes I-III Cellis, J. E., ed. (1994); “Culture of Animal Cells—A Manual of Basic Technique” by Freshney, Wiley-Liss, N. Y. (1994), Third Edition; “Current Protocols in Immunology” Volumes I-III Coligan J. E., ed. (1994); Stites et al. (eds), “Basic and Clinical Immunology” (8th Edition), Appleton & Lange, Norwalk, Conn. (1994); Mishell and Shiigi (eds), “Selected Methods in Cellular Immunology”, W. H. Freeman and Co., New York (1980); available immunoassays are extensively described in the patent and scientific literature, see, for example, U.S. Pat. Nos. 3,791,932; 3,839,153; 3,850,752; 3,850,578; 3,853,987; 3,867,517; 3,879,262; 3,901,654; 3,935,074; 3,984,533; 3,996,345; 4,034,074; 4,098,876; 4,879,219; 5,011,771 and 5,281,521; “Oligonucleotide Synthesis” Gait, M. J., ed. (1984); “Nucleic Acid Hybridization” Hames, B. D., and Higgins S. J., eds. (1985); “Transcription and Translation” Hames, B. D., and Higgins S. J., eds. (1984); “Animal Cell Culture” Freshney, R. I., ed. (1986); “Immobilized Cells and Enzymes” IRL Press, (1986); “A Practical Guide to Molecular Cloning” Perbal, B., (1984) and “Methods in Enzymology” Vol. 1-317, Academic Press; “PCR Protocols: A Guide To Methods And Applications”, Academic Press, San Diego, Calif. (1990); Marshak et al., “Strategies for Protein Purification and Characterization—A Laboratory Course Manual” CSHL Press (1996); all of which are incorporated by reference as if fully set forth herein. Other general references are provided throughout this document. The procedures therein are believed to be well known in the art and are provided for the convenience of the reader. All the information contained therein is incorporated herein by reference.

### Materials and Methods

[0295] Three genomes were download from NCBI: GCA_003417725.2_ASM341772v2 Finola, GCA_000230575.3_ASM23057v3 Purple Kush, GCA_003660325.2 Jamaican Lion DASH. Blastn against the 3 genomes evalue (<0.005)& identity (85%>).

[0296] In house editing the blast result for finding the non-redundant gene intervals.

[0297] Transcriptome Comparison

[0298] The candidates genes were compared (homology searches) to the expression profiles of 40226 PK accession transcripts from www(dot)ncbi(dot)nlm(dot)nih(dot)gov/geo/query/acc(dot)cgi?acc=GSE93201.

[0299] Phylogenetic Analysis

[0300] Ninety sequences were aligned using the MAFFT program (Version 7, www(dot)mafft(dot)cbrc(dot)jp/alignment/server/) with default parameters. Gblocks server was used for the selection of conserved blocks in the multiple alignment (Talavera, G., and Castresana, J. (2007). Improvement of phylogenies after removing divergent and ambiguously aligned blocks from protein sequence alignments. Systematic Biology 56, 564-577). A maximum likelihood tree with 100 bootstrap replicates using PhyML 3.0 software (Guindon et al., 2010) was constructed based on the automatic nucleotide model selection by AIC (Akaike Information Criterion) (“SMS: Smart Model Selection in PhyML.” Vincent Lefort, Jean-Emmanuel Longueville, Olivier Gascuel. Molecular Biology and Evolution, msx149, 2017). The tree was graphically designed using FigTree Version 1.4.2 (www(dot)tree(dot)bio(dot)ed(dot)ac(dot)uk/software/figtree/)

[0301] Gene Expression Analysis

[0302] Gene expression profiles from cannabis plant tissue at different developmental stages were downloaded from the NCBI GEO repository (www(dot)ncbi(dot)nlm(dot)nih(dot)gov/geo/). Gene expression heatmaps and unsupervised hierarchical clustering were performed with GENE-E 3.0.21329. The tissue profile was compered for PK and FN transcriptome data.

[0303] Promoter Analysis

[0304] In order to identify cis-regulatory elements within putative promoter regions; in silico analysis of the 5-UTRs (up to 1000 bp upstream of the putative translational start site) was conducted on 1K bp upstream of each sequence that was scanned for the presence of cis-acting regulatory elements involved in flowering gene expression pathway and plant hormones pathways based on the MatInspector program (www(dot)genomatix(dot)de).

### Results

[0305] Identification of Genes Associated with Cannabinoid Synthesis

[0306] Three Cannabis sequenced genomes, JL-Jamaican lion, PK-purple kush and FN-finolla), were examined against four characterized cannabinoids synthases genes: THCAS (AB212837 in genebank), CBDAS (AB292682 in genebank), and GOT {olivetolate geranyltransferase, which together with the geranyl pyrophosphate (GPP) produce CBGAS (Cannabigerolic acid)}(BK010678.1 in genebank), and the cannabinoid synthase, CBCAS like (THCA2 or here defined as CBCAS like) (KJ469379.1 in genebank). These are termed reference sequences. The comparison, resulted in a polygenetic tree composed of: eight main groups, nineteen main branches, 84 different sequences located at the different genome loci (FIG. 1).

[0307] Gene Expression Profiles of the Genes

[0308] Gene expression profiles, of the 84 different genes, from cannabis plant tissue at different developmental stages were produced. Gene expression heatmaps and unsupervised hierarchical clustering were performed. In order to predict the involvement of the genes in phytocannabinoid metabolism, publicly-available (NCBI) gene expression data of FN and the PK genomes, in cannabis plant tissue at different developmental stages was used (FIG. 2).

[0309] Promoter Analysis

[0310] The DNA promoter region that initiates transcription of each gene was analyzed to identify the type of binding sites found in the region of the gene.

[0311] The upstream 1 K bp prior to the translational start sites of the genes were examined for the presence of various promoter elements. Elements common to 85% of the promoters and up, were examined (Table 1). Out of them 13 elements families, cohesive to flowering or plant hormones regulatory process were chosen. These families, as detailed in Table 1 below, were examined for each branch, seeking common regulatory in a uniformity regulatory elements binding sites sequences patterns.

TABLE 1
The common elements that were detected in the promoters regions of the Cannabis genes.

| Element | Response to | Reference |
|---|---|---|
| ARF3 | Auxin Response Factor 3 | Franco-Zorrilla J M, López-Vidriero I, Carrasco J L, Godoy M, Vera P, Solano R |
| | | DNA-binding specificities of plant transcription factors and |
| | | their potential to define target genes. |
| | | Proc Natl Acad Sci USA 111, 2367-72 (2014) |
| CE1F | a-biotic stress element | Molecular responses to dehydration and low temperature: |
| | | differences and cross-talk between two stress signaling pathways. |
| | | Shinozaki K, Yamaguchi-Shinozaki K |
| | | Curr Opin Plant Biol. 2000 Jun; 3(3):217-23 |
| CCAF | Circadian clock associated | A Myb-related transcription factor is involved in the |
| | | phytochrome regulation of an Arabidopsis Lhcb gene. |
| | | Plant Cell 9, 491-507 (1997) |
| | | DNA-binding specificities of plant transcription factors and |
| | | their potential to define target genes. |
| | | Proc Natl Acad Sci USA 111, 2367-72 (2014) |
| DREB | a-biotic stress element | Molecular responses to dehydration and low temperature: |
| | | differences and cross-talk between two stress signaling pathways. |
| | | Shinozaki K, Yamaguchi-Shinozaki K |
| | | Curr Opin Plant Biol. 2000 Jun; 3(3):217-23 |
| EINL | Ethylen insensitive 3 like | O'Malley R C, Huang S C, Song L, Lewsey M G, Bartlett A, |
| | factors | Nery J R, Galli M, Gallavotti A, Ecker J R |
| | | Cistrome and Epicistrome Features Shape the Regulatory DNA Landscape. |
| | | Cell 165, 1280-1292 (2016) |
| EREF | Ethylen response element | Nole-Wilson S, Krizek B A |
| | factors, | DNA binding properties of the Arabidopsis floral development |
| | AINTEGUMENTA in | protein AINTEGUMENTA. |
| | flowering response | Nucleic Acids Res 28, 4076-82 (2000) |
| GAPB | GAP-Box (light response | Cis-acting elements essential for light regulation of the nuclear |
| | elements) | gene encoding the A subunit of chloroplast glyceraldehyde 3- |
| | | phosphate dehydrogenase in Arabidopsis thaliana. |
| | | Plant Physiol 112, 1563-71 (1996) |
| | | Identification of a light-responsive region of the nuclear gene |
| | | encoding the B subunit of chloroplast glyceraldehyde 3- |
| | | phosphate dehydrogenase from Arabidopsis thaliana. |
| | | Plant Physiol 105, 357-67 (1994) |
| HEAT | Heat shock factors | Interaction between Arabidopsis heat shock transcription |
| | | factor 1 and 70 kDa heat shock proteins. J Exp Bot 53, 371-5 (2002) |
| | | Selective activation of the developmentally regulated Hahsp17.6 |
| | | G1 promoter by heat stress transcription factors. Plant |
| | | Physiol 129, 1207-15 (2002) |
| IBOX | light regulation | Interaction of a GATA factor with cis-acting elements |
| | | involved in light regulation of nuclear genes encoding |
| | | chloroplast glyceraldehyde-3-phosphate dehydrogenase in |
| | | Arabidopsis. Biochem Biophys Res Commun 300, 555-62 (2003) |
| | | Arabidopsis thaliana GATA factors: organization, expression |
| | | and DNA-binding characteristics. |
| | | Plant Mol Biol 50, 43-57 (2002) |
| JARE | Jasmonate response | The Arabidopsis JAZ2 promoter contains a G-Box and |
| | element | thymidine-rich module that are necessary and sufficient for |
| | | jasmonate-dependent activation by MYC transcription factors |
| | | and repression by JAZ proteins. Plant Cell Physiol 53, 330-43 (2012) |
| LREM | Light responsive element | Welsch R, Maass D, Voegel T, Dellapenna D, Beyer P. |
| | motif | Transcription factor RAP2.2 and its interacting partner |
| | | SINAT2: stable elements in the carotenogenesis of Arabidopsis leaves. |
| | | Plant Physiol 145, 1073-85 (2007) |
| STKM | Storekeeper motif | Storekeeper defines a new class of plant-specific DNA-binding |
| | | proteins and is a putative regulator of patatin expression. Plant |
| | | J 30, 489-97 (2002) |
| TOEF | Target of early activation | DNA-binding specificities of plant transcription factors and their |
| | tagged factors -AP2 domain | potential to define target genes. Proc Natl Acad Sci USA 111, 2367-72 (2014) |

[0312] Sequences Analysis of the Promoter Region and Expression Profile

[0313] The following data shows the sequences of each gene and promoter region divided by the eight main groups created by the phylogenetic analysis (FIGS. 3-19A-E).

### Example 1.1

### Group 1 (CBCAS Like Genes)

[0314] This first branch is composed of 15 genes. CBCAS like genes (FIG. 3) were found in all the 3 genomes in 5 copies (indicating amplification), exhibiting 99% nucleic acid sequence identity. The sequences are highly conserved and their promotor region shows similar controlling groups. The promotor conservation was found in the two examined genomes of FN (representing hemp group) and PK (representing medicinal (drug)-type strains). Differences were found in the expression pattern of the genes in the two genomes: in PK high expression was found in the flower and the vegetative part while in FN high expression is was found in the seeds and young flowers. However, on both flower expression was evident in different development stages.

TABLE 2

| | | Chromosome | | Number | | |
|---|---|---|---|---|---|---|
| | Genome JL- | orientation | | of genes | | |
| | Jamaican lion | no chromosome | | and copies | Tissue | Tissue |
| Group 1-CsCBCAS like/ | PK-purple Kush | orientations, | | 1 gene | associated | associated |
| SEQ ID NO: 87-101 | FN-finolla | PK chr07 | Exons | 5 copies | by PK | by FN |
| PK.AGQN03010731.1 | PK | | no | | shoot and | seed and |
| 674 . . . 1830 | | | introns | | flower | mid flower |
| PK.AGQN03006963.1 | PK | | no | | shoot and | seed and |
| 14285 . . . 15918 | | | introns | | flower | mid flower |
| PK.AGQN03006292.1 | PK | | no | | shoot and | seed and |
| 7724 . . . 8880 | | | introns | | flower | mid flower |
| FN.QKVJ02004136.1 | FN | | no | | shoot and | seed and |
| 3039 . . . 4672 | | | introns | | flower | mid flower |
| PK.AGQN03005496.1 | PK | | no | | shoot and | seed and |
| 2986 . . . 4620 | | | introns | | flower | mid flower |
| CsCBCAS KJ469379.1 | | | | | | |
| PK.AGQN03010271.1 | PK | | no | | shoot and | seed and |
| 2974 . . . 4605 | | | introns | | flower | mid flower |
| J.001923F.001923F.49866- | JL | | no | | shoot and | seed and |
| 51502 | | | introns | | flower | mid flower |
| FN.QKVJ02001794.1 | FN | | no | | shoot and | seed and |
| 69159 . . . 70796 | | | introns | | flower | mid flower |
| J.000410F.000410F.385650- | JL | | no | | shoot and | seed and |
| 387287 | | | introns | | flower | mid flower |
| _R_FN.QKVJ02004358.1 | FN | | no | | shoot and | seed and |
| 21738 . . . 23377 | | | introns | | flower | mid flower |
| J.000410F.000410F.531453- | JL | | no | | shoot and | seed and |
| 533091 | | | introns | | flower | mid flower |
| J.001832F.001832F.32483- | JL | | no | | shoot and | seed and |
| 34120 | | | introns | | flower | mid flower |
| FN.QKVJ02001794.1 | FN | | no | | shoot and | seed and |
| 136709 . . . 138341 | | | introns | | flower | mid flower |
| FN.QKVJ02004887.1 | FN | | no | | shoot and | seed and |
| 13940 . . . 15577 | | | introns | | flower | mid flower |
| J.000410F.000410F.493426- | JL | PK-chr7 | no | | shoot and | seed and |
| 495063 | | | introns | | flower | mid flower |

### Example 1.2

### Group 3

[0315] Group 3 is the largest identified. The genes copies present at least 99% nucleic acid sequence identity. This branch is composed of 22 genes. The controlling elements vary in this group (FIGS. 8A-B). The expression of the genes is different between the FN and PK (Table 3), although both present flower expression.

TABLE 3

| | Genome JL- | | | | | |
|---|---|---|---|---|---|---|
| | Jamaican lion | | | number | tissue | tissue |
| Group 3/SEQ ID | PK-purple Kush | Chromosome | | of genes | associated | associated |
| NO: 104-133 | FN-finolla | orientation | exons | and copies | by PK | by FN |
| FN.QKVJ02000019.1 | FN | | no | 13 genes | flower | low in mid flower |
| 709761 . . . 711394 | | | introns | | and shoot | male flower and seed |
| J.002246F.002246F.14795- | JL | | no | | flower | low in mid flower |
| 16411 | | | introns | | and shoot | male flower and seed |
| J.000863F.000863F.42591- | JL | | no | | flower | low in mid flower |
| 44225 | | | introns | | and shoot | male flower and seed |
| J.001363F.001363F.161024- | JL | | no | | flower | low in mid flower |
| 162651 | | | introns | | and shoot | male flower and seed |
| FN.QKVJ02000019.1 | FN | | no | | flower | low in mid flower |
| 650928 . . . 652563 | | | introns | | and shoot | male flower and seed |
| FN.QKVJ02000019.1 | FN | | no | | flower | low in mid flower |
| 618430 . . . 620061 | | | introns | | and shoot | male flower and seed |
| FN.QKVJ02000019.1 | FN | | no | | flower | low in mid flower |
| 535563 . . . 537191 | | | introns | | and shoot | male flower and seed |
| J.001656F.001656F.89207- | JL | | no | | flower | low in mid flower |
| 90841 | | | introns | | and shoot | male flower and seed |
| PK.AGQN03001397.1 | PK | | no | | flower | low in mid flower |
| 570 . . . 2203 | | | introns | | and shoot | male flower and seed |
| FN.QKVJ02000019.1 | FN | | no | | flower | low in mid flower |
| 589417 . . . 591039 | | | introns | | and shoot | male flower and seed |
| J.000863F.000863F.141630- | JL | PK-chr7 | no | | flower | low in mid flower |
| 143256:0.001201 | | | introns | | and shoot | male flower and seed |
| J.001656F.001656F.130538- | JL | PK-chr6 | no | | flower | low in mid flower |
| 132147 | | | introns | | and shoot | male flower and seed |
| PK.AGQN03001397.1 | PK | | no | | flower | low in mid flower |
| 36883 . . . 38486 | | | introns | | and shoot | male flower and seed |
| J.000317F.000317F.549255- | JL | | no | | flower | low in mid flower |
| 550856 | | | introns | | and shoot | male flower and seed |
| FN.QKVJ02000019.1 | FN | | no | | flower | low in mid flower |
| 742543 . . . 743507 | | | introns | | and shoot | male flower and seed |
| J.001363F.001363F.129699- | JL | | no | | flower | low in mid flower |
| 130677 | | | introns | | and shoot | male flower and seed |
| PK.AGQN03001397.1 | PK | | no | | flower | low in mid flower |
| 88111 . . . 89742 | | | introns | | and shoot | male flower and seed |
| J.000317F.000317F.600480- | JL | | no | | flower | low in mid flower |
| 602111 | | | introns | | and shoot | male flower and seed |
| PK.chr06 | PK | | no | | flower | low in mid flower |
| 62089454 . . . 62091088 | | | introns | | and shoot | male flower and seed |
| J.001656F.001656F.36269- | JL | | no | | flower | low in mid flower |
| 37903 | | | introns | | and shoot | male flower and seed |
| J.000863F.000863F.76921- | JL | | no | | flower | low in mid flower |
| 78545 | | | introns | | and shoot | male flower and seed |
| J.000863F.000863F.111241- | JL | | no | | flower | low in mid flower |
| 112867 | | | introns | | and shoot | male flower and seed |

### Example 1.3

### Group 4 (CBDAS Like Genes)

[0316] The forth branch is of the CBDAS like genes, composed of 8 genes in the three genomes. These genes exhibited at least 99% nucleic acid sequence identity (FIG. 9). Diverse motifs were found in the promoter regions of the genes (FIG. 10) and differences in the expression tissues (Table 4) albeit flower expression was evident in all.

TABLE 4

| | | | | | | |
|---|---|---|---|---|---|---|
| | | | | number | | |
| | Genome JL- | Chromosome | | of genes | | |
| | Jamaican lion | orientation | | and copies | tissue | tissue |
| Group 4- CsCBD/SEQ | PK-purple Kush | PK-chr2, chr7 | | up to | associated | associated |
| ID NO: 134-141 | FN-finolla | PN-chr6 | exons | 6 genes | by PK | by FN |

| | | | | |
|---|---|---|---|---|
| PK.chr02 | PK | no | low in flower | very low in mid |
| 60319585 . . . 60321196 | | introns | and shoot | flower and seed |
| J.000692F.000692F.176431- | JL | no | low in flower | very low in mid |
| 178062 | | introns | and shoot | flower and seed |
| PK.chr07 | PK | no | low in flower | very low in mid |
| 28773364 . . . 28774212 | | introns | and shoot | flower and seed |
| PK.chr02 | PK | no | low in flower | very low in mid |
| 60412489 . . . 60414121 | | introns | and shoot | flower and seed |
| J.000692F.000692F.76354- | JL | no | low in flower | very low in mid |
| 77738 | | introns | and shoot | flower and seed |
| J.000692F.000692F.83902- | JL | no | low in flower | very low in mid |
| 84227 | | introns | and shoot | flower and seed |
| CsCBDAS AB292682 | | no | low in flower | very low in mid |
| | | introns | and shoot | flower and seed |
| J.001055F.001055F.4195- | JL | no | low in flower | very low in mid |
| 5829 | | introns | and shoot | flower and seed |
| FN.chr06 | FN | no | low in flower | very low in mid |
| 21837038 . . . 21838672 | | introns | and shoot | flower and seed |

### Example 1.4

### Group 5 (CBGAS Like Genes)

[0317] The CBGAS like branch is composed of eight genes. The CBGAS is the only one assembly with 10 exons, in the three homologs. The homologs exhibit more than 99% nucleic acid sequence identity and all mapped in FN and PK genomes to chromosome 10. Minor expression is evident in all plant tissues, except to flower tissue where it increases dramatically. Promoter analysis showed binding elements involved in the flowering progress: (TOEF), light response cascades (IBOX, GAPB), circadian clock cascade (CCAF) and heat and Jasmonate as stress recons (JARE, HEAT).

TABLE 5

| | | | | | | |
|---|---|---|---|---|---|---|
| | | | | number | | |
| | Genom JL- | Chromozom | | of genes | | |
| | jamaican lion | oraintation | | and copies | tissue | tissue |
| Group 5- CBGAS/SEQ | PK-purpel Kush | PK-chr10 | | up to | associated | associated |
| ID NO: 142-149 | FN-finolla | FN-chr10 | exons | 7 genes | by PK | by FN |

| | | | | |
|---|---|---|---|---|
| J.000205F.000205F.864079- | JL | 10 | very low in | very low in mid |
| 871104 | | | all parts | flower and seed |
| PK.chr10 | PK | 10 | flower | very low in mid |
| 3931160 . . . 3939229 | | | and shoot | flower and seed |
| _R_FN.chr10 | FN | 10 | flower | very low in mid |
| 1178556 . . . 1185662 | | | and shoot | flower and seed |
| PK.chr10 | PK | 10 | undetected | undetected |
| 3924129 . . . 3928937 | | | | |
| J.000205F.000205F.857028- | JL | 10 | undetected | undetected |
| 861839 | | | | |
| _R_FN.chr10 | FN | 10 | undetected | undetected |
| 1187902 . . . 1192656 | | | | |
| _R_FN.chr10 | FN | 10 | flower | low in mid an male |
| 1147496 . . . 1156156 | | | and shoot | flower and seed |
| J.000205F.000205F.893640- | JL | 10 | flower | low in mid an male |
| 908144 | | | and shoot | flower and seed |

### Example 1.5

### Group 6

[0318] This branch was found in JL genome. It has one sequence with 10 exons and promoter elements (FIG. 13).

TABLE 6

| | Genome JL- | | | | | |
|---|---|---|---|---|---|---|
| | Jamaican lion | | | number | tissue | tissue |
| Group 6/SEQ | PK-purple Kush | Chromosome | | of genes | associated | associated |
| ID NO: 150 | FN-finolla | orientation | exons | and copies | by PK | by FN |
| J.000692F.000692F.241449- | JL | No | 10 | 1 gene | undetected | undetected |
| 258142 | | chromozom | | | | |

### Example 1.6

### Group 7

[0319] Composed of 25 genes. The phylogenetic analysis shows up to 7 main candidate genes, exhibiting at least 99% nucleic acid sequence identity (FIG. 14). Diversity in the controlling elements and expression pattern is shown in Table 7.

TABLE 7

| | Genome JL- | | | | | |
|---|---|---|---|---|---|---|
| | Jamaican lion | | | number | tissue | tissue |
| Group 7/SEQ | PK-purple Kush | Chromosome | | of genes | associated | associated |
| ID NO: 151-167 | FN-finolla | orientation | exons | and copies | by PK | by FN |
| _R_J.000493F.000493F.506409- | JL | PK-chr7 | no | up to | ROOT | undetected |
| 507745 | | | introns | 11 genes | | |
| _R_J.001432F.001432F. 14412- | JL | | no | | ROOT | undetected |
| 15748 | | | introns | | | |
| J.001682F.001682F.138453- | JL | PK-chr7 | no | | ROOT | undetected |
| 139524 | | | introns | | | |
| PK.AGQN03004744.1 | PK | | no | | ROOT | undetected |
| 51696 . . . 53032 | | | introns | | | |
| J.001008F.001008F.84862- | JL | | no | | ROOT | undetected |
| 85940 | | | introns | | | |
| PK.chr07 | PK | | no | | ROOT | undetected |
| 52806167 . . . 52807512 | | | introns | | | |
| PK.chr01 | PK | | no | | very low | undetected |
| 27733999 . . . 27735023 | | | introns | | in root | |
| J.000161F.000161F.656278- | JL | PK-chr1 | no | | very low | undetected |
| 657204 | | | introns | | in root | |
| J.000447F.000447F.501848- | JL | FN-chr3 | no | | ROOT | undetected |
| 503032 | | PK-chr3 | introns | | | |
| _R_FN.chr03 | FN | | no | | root | undetected |
| 10150821 . . . 10152435 | | | introns | | | |
| FN.chr03 | FN | | no | | root | undetected |
| 11785500 . . . 11792035 | | | introns | | | |
| FN.chr03 | FN | | no | | root | undetected |
| 10523782 . . . 10525193 | | | introns | | | |
| _R_FN.QKVJ02002188.1 | FN | | no | | root | undetected |
| 105614 . . . 112220 | | | introns | | | |
| _R_PK.chr03 | PK | | no | | root | undetected |
| 64666023 . . . 64667253 | | | introns | | | |
| PK.AGQN03004229.1 | PK | | no | | root | seed and |
| 65847 . . . 66514 | | | introns | | | mid flower |
| PK.chr03 | PK | | no | | root | undetected |
| 65145262 . . . 65146450 | | | introns | | | |
| _R_J.000501F.000501F.437489- | JL | | no | | root | undetected |
| 438840 | | | introns | | | |
| J.000317F.000317F.716771- | JL | | no | | shoot and | seed and |
| 718196 | | | introns | | flower | mid flower |
| _R_J.001363F.001363F.4383- | JL | | no | | shoot and | seed and |
| 5806 | | | introns | | flower | mid flower |
| FN.QKVJ02000019.1 | FN | | no | | shoot and | seed and |
| 874669 . . . 876094 | | | introns | | flower | mid flower |
| J.001111F.001111F.31566- | JL | PK-chr3 | no | | shoot and | seed and |
| 33200 | | | introns | | flower | mid flower |
| PK.chr03 | FN | | no | | shoot and | seed and |
| 50895087 . . . 50896712 | | | introns | | flower | mid flower |
| _R_FN.chr06 | FN | | no | | shoot and | seed and |
| 22244180 . . . 22245793 | | | introns | | flower | mid flower |
| PK.AGQN03001586.1 | PK | | no | | shoot and | seed and |
| 35797 . . . 37401 | | | introns | | flower | mid flower |
| J.000480F.000480F.148308- | JL | PN-chr6 | no | | shoot and | seed and |
| 149912 | | | introns | | flower | mid flower |

### Example 1.7

### Group 8

[0320] Composed of 5 genes. This branch is shown in JL and FN in two copies and in PK in one. They exhibit at least 99% identity (FIG. 16). However, the controlling elements are highly variable (FIG. 17).

TABLE 8

| | | | | number | | |
|---|---|---|---|---|---|---|
| | Genome JL- | | | of genes | | |
| | Jamaican lion | | exons | and copies | tissue | tissue |
| Group 8/SEQ ID | PK-purple Kush | Chromosome | no | 1 gene | associated | associated |
| NO: 168-172 | FN-finolla | orientation | introns | 1-2 copies | by PK | by FN |
| PK.chr07 | PK | no | no | | shoot and | seed and |
| 46549879 . . . 46551515 | | | introns | | flower | mid flower |
| _R_FN.QKVJ02004488.1 | FN | | no | | shoot and | seed and |
| 6165 . . . 7801 | | | introns | | flower | mid flower |
| FN.QKVJ02001794.1 | FN | | no | | shoot and | seed and |
| 9420 . . . 11056 | | | introns | | flower | mid flower |
| J.000410F.000410F.436740- | JL | | no | | shoot and | seed and |
| 438377 | | | introns | | flower | mid flower |
| J.001923F.001923F.108098- | JL | | no | | shoot and | seed and |
| 109729 | | | introns | | flower | mid flower |

TABLE 9
Summary of all 90 candidates.

| | Genome JL- | | | | |
|---|---|---|---|---|---|
| | Jamaican lion | | | number | |
| | PK-purple Kush | Chromosome | | of genes | tissue |
| | FN-finolla | orientation | exons | and copies | associated |
| Group 5-CBGAS | | PK-chr10 | | up to 7 | |
| | | FN-chr10 | | genes | |
| J.000205F.000205F.864079- | JL | | 10 | | flower |
| 871104 | | | | | |
| PK.chr10 | PK | | 10 | | flower |
| 3931160 . . . 3939229 | | | | | |
| _R_FN.chr10 | FN | | 10 | | flower |
| 1178556 . . . 1185662 | | | | | |
| PK.chr10 | PK | | 10 | | flower |
| 3924129 . . . 3928937 | | | | | |
| J.000205F.000205F.857028- | JL | | 10 | | flower |
| 861839 | | | | | |
| _R_FN.chr10 | FN | | 10 | | flower |
| 1187902 . . . 1192656 | | | | | |
| _R_FN.chr10 | FN | | 10 | | flower |
| 1147496 . . . 1156156 | | | | | |
| J.000205F.000205F.893640- | JL | | 10 | | flower |
| 908144 | | | | | |
| Group 6 | | | | | |
| J.000692F.000692F.241449- | JL | | 10 | 1 gene | flower |
| 258142 | | | | | |
| Group 3 | | | | | |
| _R_FN.QKVJ02000019.1 | FN | | no | 13 genes | flower |
| 709761 . . . 711394 | | | introns | | |
| _R_J.002246F.002246F.14795- | JL | | no | | flower |
| 16411 | | | introns | | |
| J.000863F.000863F.42591- | JL | | no | | flower |
| 44225 | | | introns | | |
| J.001363F.001363F.161024- | JL | | no | | flower |
| 162651 | | | introns | | |
| _R_FN.QKVJ02000019.1 | FN | | no | | flower |
| 650928...652563 | | | introns | | |
| _R_FN.QKVJ02000019.1 | FN | | no | | flower |
| 618430...620061 | | | introns | | |
| _R_FN.QKVJ02000019.1 | FN | | no | | flower |
| 535563...537191 | | | introns | | |
| _R_J.001656F.001656F.89207- | JL | | no | | flower |
| 90841 | | | introns | | |
| _R_PK.AGQN03001397.1 | PK | | no | | flower |
| 570 . . . 2203 | | | introns | | |
| _R_FN.QKVJ02000019.1 | FN | | no | | flower |
| 589417 . . . 591039 | | | introns | | |
| J.000863F.000863F.141630- | JL | PK-chr7 | no | | flower |
| 143256:0.001201 | | | introns | | |
| _R_J.001656F.001656F.130538- | JL | PK-chr6 | no | | flower |
| 132147 | | | introns | | |
| _R_PK.AGQN03001397.1 | PK | | no | | flower |
| 36883 . . . 38486 | | | introns | | |
| _R_J.000317F.000317F.549255- | JL | | no | | flower |
| 550856 | | | introns | | |
| _R_FN.QKVJ02000019.1 | FN | | no | | flower |
| 742543 . . . 743507 | | | introns | | |
| J.001363F.001363F.129699- | JL | | no | | flower |
| 130677 | | | introns | | |
| _R_PK.AGQN03001397.1 | PK | | no | | flower |
| 88111 . . . 89742 | | | introns | | |
| _R_J.000317F.000317F.600480- | JL | | no | | flower |
| 602111 | | | introns | | |
| _R_PK.chr06 | PK | | no | | flower |
| 62089454 . . . 62091088 | | | introns | | |
| _R_J.001656F.001656F.36269- | JL | | no | | flower |
| 37903 | | | introns | | |
| J.000863F.000863F.76921- | JL | | no | | flower |
| 78545 | | | introns | | |
| J.000863F.000863F. 111241- | JL | | no | | flower |
| 112867 | | | introns | | |
| Group 4 -CsCBD | | PK-chr2, chr7 | | up to 6 | |
| | | PN-chr6 | | genes | |
| _R_PK.chr02 | PK | | no | | flower |
| 60319585 . . . 60321196 | | | introns | | |
| J.000692F.000692F.176431- | JL | | no | | flower |
| 178062 | | | introns | | |
| _R_PK.chr07 | PK | | no | | flower |
| 28773364 . . . 28774212 | | | introns | | |
| _R_PK.chr02 | PK | | no | | flower |
| 60412489 . . . 60414121 | | | introns | | |
| J.000692F.000692F.76354- | JL | | no | | flower |
| 77738 | | | introns | | |
| J.000692F.000692F.83902- | JL | | no | | flower |
| 84227 | | | introns | | |
| _R_CsCBDAS_AB292682 | | | no | | flower |
| | | | introns | | |
| _R_J.001055F.001055F.4195- | JL | | no | | flower |
| 5829 | | | introns | | |
| _R_FN.chr06 | FN | | no | | flower |
| 21837038 . . . 21838672 | | | introns | | |
| Group 7 | | | | | |
| _R_J.000493F.000493F.506409- | JL | PK-chr7 | no | up to 11 | |
| 507745 | | | introns | genes | |
| _R_J.001432F.001432F. 14412- | JL | | no | | flower |
| 15748 | | | introns | | |
| J.001682F.001682F.138453- | JL | PK-chr7 | no | | flower |
| 139524 | | | introns | | |
| PK.AGQN03004744.1 | PK | | no | | flower |
| 51696 . . . 53032 | | | introns | | |
| J.001008F.001008F.84862- | JL | | no | | |
| 85940 | | | introns | | |
| PK.chr07 | PK | | no | | flower |
| 52806167 . . . 52807512 | | | introns | | |
| PK.chr01 | PK | | no | | flower |
| 27733999 . . . 27735023 | | | introns | | |
| J.000161F.000161F.656278- | JL | PK-chr1 | no | | flower |
| 657204 | | | introns | | |
| J.000447F.000447F.501848- | JL | FN-chr3 | no | | flower |
| 503032 | | PK-chr3 | introns | | |
| _R_FN.chr03 | FN | | no | | flower |
| 10150821 . . . 10152435 | | | introns | | |
| FN.chr03 | FN | | no | | flower |
| 11785500 . . . 11792035 | | | introns | | |
| FN.chr03 | FN | | no | | flower |
| 10523782 . . . 10525193 | | | introns | | |
| _R_FN.QKVJ02002188.1 | FN | | no | | flower |
| 105614 . . . 112220 | | | introns | | |
| _R_PK.chr03 | PK | | no | | flower |
| 64666023 . . . 64667253 | | | introns | | |
| PK.AGQN03004229.1 | PK | | no | | flower |
| 65847 . . . 66514 | | | introns | | |
| PK.chr03 | PK | | no | | flower |
| 65145262 . . . 65146450 | | | introns | | |
| _R_J.000501F.000501F.437489- | JL | | no | | flower |
| 438840 | | | introns | | |
| J .000317F.000317F.716771- | JL | | no | | flower |
| 718196 | | | introns | | |
| _R_J.001363F.001363F.4383- | JL | | no | | flower |
| 5806 | | | introns | | |
| FN.QKVJ02000019.1 | FN | | no | | flower |
| 874669 . . . 876094 | | | introns | | |
| J.001111F.001111F.31566- | JL | PK-chr3 | no | | flower |
| 33200 | | | introns | | |
| PK.chr03 | FN | | no | | flower |
| 50895087 . . . 50896712 | | | introns | | |
| _R_FN.chr06 | FN | | no | | flower |
| 22244180 . . . 22245793 | | | introns | | |
| PK.AGQN03001586.1 | PK | | no | | flower |
| 35797 . . . 37401 | | | introns | | |
| J.000480F.000480F.148308- | JL | PN-chr6 | no | | flower |
| 149912 | | | introns | | |
| Group 1-CsCBCAS_THCAS like | | no chromozom | | 1 gene | flower |
| | | orientation, | | 5 copies | |
| | | PK chr07 | | | |
| PK.AGQN03010731.1 | PK | | no | | flower |
| 674 . . . 1830 | | | introns | | |
| PK.AGQN03006963.1 | PK | | no | | flower |
| 14285 . . . 15918 | | | introns | | |
| PK.AGQN03006292.1 | PK | | no | | flower |
| 7724 . . . 8880 | | | introns | | |
| FN.QKVJ02004136.1 | FN | | no | | flower |
| 3039 . . . 4672 | | | introns | | |
| PK.AGQN03005496.1 | PK | | no | | flower |
| 2986 . . . 4620 | | | introns | | |
| _R_CsCBCAS_THCAS like | | | | | |
| PK.AGQN03010271.1 | PK | | no | | flower |
| 2974 . . . 4605 | | | introns | | |
| J.001923F.001923F.49866- | JL | | no | | flower |
| 51502 | | | introns | | |
| FN.QKVJ02001794.1 | FN | | no | | flower |
| 69159 . . . 70796 | | | introns | | |
| J.000410F.000410F.385650- | JL | | no | | flower |
| 387287 | | | introns | | |
| _R_FN.QKVJ02004358.1 | FN | | no | | flower |
| 21738 . . . 23377 | | | introns | | |
| J.000410F.000410F.531453- | JL | | no | | flower |
| 533091 | | | introns | | |
| J.001832F.001832F.32483- | JL | | no | | flower |
| 34120 | | | introns | | |
| FN.QKVJ02001794.1 | FN | | no | | flower |
| 136709 . . . 138341 | | | introns | | |
| FN.QKVJ02004887.1 | FN | | no | | flower |
| 13940 . . . 15577 | | | introns | | |
| J.000410F.000410F.493426- | JL | PK-chr7 | no | | flower |
| 495063 | | | introns | | |
| Group 2- CsTHC | | | no | 1 gene | flower |
| | | | introns | | |
| _R_J.000692F.000692F.378942- | JL | | no | | flower |
| 380579 | | | introns | | |
| _R_CsTHCAS_AB212837 | | PK-chr7 | no | | flower |
| | | | introns | | |
| PK.chr07 | PK | | no | | flower |
| 28650050 . . . 28651687 | | | introns | | |
| Group 8 | | | no | 1 gene | flower |
| | | | introns | 1-2 copies | |
| PK.chr07 | PK | | no | | flower |
| 46549879 . . . 46551515 | | | introns | | |
| _R_FN.QKVJ02004488.1 | FN | | no | | flower |
| 6165 . . . 7801 | | | introns | | |
| FN.QKVJ02001794.1 | FN | | no | | flower |
| 9420 . . . 11056 | | | introns | | |
| J.000410F.000410F.436740- | JL | | no | | flower |
| 438377 | | | introns | | |
| J.001923F.001923F.108098- | JL | | no | | flower |
| 109729 | | | introns | | |

### Example 2

### Functional Analysis of Cannabinoid Genes by Gene Over Expression Using an Agrobacterium-Mediated Expression System in Cannabis sativa

[0321] A transgenic approach is used to determine the function of the uncovered genes in a cannabis callus culture, as exemplified on CBDAS and THCAS.

[0322] Materials and Methods

[0323] Plant Material

[0324] Shoots of C. sativa (cultivar #201) with 2-3 nodes were maintained under in vitro conditions on proliferation medium CRE (0.5 ppm m-Topolin, 1 MIS, 3% sucrose, 0.8% agar, pH 5.7). Leaves were excised, cut longitudinally and placed on regeneration medium CRF (0.2 ppm TDZ, 0.1 ppm NAA, 1 MIS, 3% sucrose, 0.8% agar, pH 5.7) for callus formation. After 1 month of incubation under a white fluorescent light (2000 lux) and 24±2° C. temperature with 40-50% relative humidity, generated calli were subjected to agrobacterium mediated transformation.

[0325] Agrobacterium Mediated Transformation

[0326] The Agrobacterium strain EHA105 harboring the desirable plasmid was grown in LB medium (10 g/l bacto-tryptone, 10 g/l NaCl, 5 g/l yeast extract) with antibiotics (50 μg/ml kanamycin) at 28° C. for 18-24 h. Then, agrobacterium was resuspended in a fresh transformation buffer (0.5 MS salts and full strength of B5 vitamins, 3% sucrose, pH 5.2 with 100 μM acetosyringone) to O.D 600=1, and further grown for 3 hours.

[0327] After 3 hours of incubation, the culture was transferred to a sterile vacuum chamber containing the callus. A pressure of 7 mBar was applied for 2 minutes under laminar air flow and the process was repeated 4 times. After vacuum infiltration process, the callus were transferred on CRF media containing 100 μM acetosyringone for 3 days. After co-cultivation the calli were treated with 200 ppm ticarticillin for 30-40 minutes followed by washes in sterilized double distilled water and drying. Following the treatment, the calli were transferred to CRF medium containing 200 ppm ticarticillin and kept under the same conditions as used for callus generation. After one week of incubation, half were transferred to metabolic analysis and half for further growth. Cultures were maintained on the same medium up to 2-3 sub-culture cycles.

[0328] GUS Assay

[0329] Detection of positive cells was carried out by an overnight incubation of callus cells in GUS buffer containing 0.1 M phosphate buffer, 100 ppm 5-Bromo-4-chloro-3-indolyl-beta-D-glucuronic Acid (X-gluc) and 20% methanol. The incubation was carried out at 37° C.

[0330] Plasmid Preparation

[0331] To clone CsTHCAS (SEQ ID NO: 173) and CsCBDAS (SEQ ID NO: 174) gDNA, Cannabis gDNA was isolated from young leaves approximately 2 wk old harvested in the morning by using C-TAB protocol. The CsTHCAS and CsCBDAS gDNA was amplified by using the primer set 5′-GGGGACAAGTTTGTACAAAAAAGCAGGCTATGAATTGCTCAGCATTTTCCTTTTGG-3′ (SEQ ID NO: 175) and 5′-GGGGACCACTTTGTACAAGAAAGCTGGGTATGATGATGCGGTGGAAGAGGTG-3′ (SEQ ID NO: 176) for CsTHC, and amplified by using the primer set 5′-GGGGACAAGTTTGTACAAAAAAGCAGGCTATGAAGTGCTCAACATTCTCCTT-3′ (SEQ ID NO: 177) and 5′-GGGGACCACTTTGTACAAGAAAGCTGGGTTAATGACGATGCCGTGGAAG-3′ (SEQ ID NO: 178) for CsCBD which was designed based on the sequence information of AB212837 for CsTHCAS and AB292682 for CSCBDAS and showed high sequence homologies. The amplified cDNA was cloned into the pDONR221 vector (Life Technologies) plasmid by a Gateway BP recombination reaction and the complete gDNA sequences were determined. CsTHC and CsCBD cDNA were transferred to the pK7WG2 plasmid (VIB) by a Gateway LR recombination reaction (Life Technologies) to make over expression plasmids: 35S:CsTHC and 35S:CsCBD binary vector (pK7WG2-CsTHC and pK7WG2-CsCBD) See FIGS. 18A-B.

[0332] HPLC Analysis

[0333] Sample Preparation from Tissue Culture for HPLC Analysis

[0334] 1) Sample Preparation for Cali Samples

[0335] a) Cali samples were froze by liquid nitrogen, and dried by Lyophilization for three days until full dryness.

[0336] b) Samples were grinded with automated tissue homogenizer at 1200 RPM for 3.5 min.

[0337] c) 100 mg of each sample were weighed accurately into plastic tube, and 1 mL of Ethanol were added.

[0338] Sample Preparation for Leaves/Flowers/Shoots

[0339] a) Samples were dried at 40° C. overnight until full dryness.

[0340] b) Samples were grinded with automated tissue homogenizer at 1200 RPM for 3.5 min.

[0341] c) 100 mg of each sample were weighed accurately into plastic tube, and 4 mL of Ethanol were added.

[0342] 2) Samples were vortexed for 30 sec, and shook mechanically for 20 min at 190 rpm.

[0343] 3) Samples were filtered through 0.22 μm PTFE syringe filter into HPLC vial, and examined in HPLC.

[0344] 4) The chromatographic conditions are based on Meiri et al., 2018. Separation was conducted using a Halo C18 column (3.0×150 mm, 2.7 μm) with a guard column (3.0×5 mm, 2.7 μm) (Advanced Material Technology, Wilmington, Del., USA) and a ternary A/B/C multistep gradient (solvent A: 0.1% formic acid in ULC/MS water, solvent B: 0.1% formic acid in acetonitrile, and solvent C: methanol, all solvents were of ULC/MS grade). Solvent C was kept constant at 5% throughout the run. The multistep gradient program was established as follows: initial conditions were 50% B raised to 67% B until 2 min, held at 67% B for 4 min, and then raised to 90% B until 10 min, held at 90% B until 14 min, decreased to 50% B over the next min, and held at 50% B until 20 min for re-equilibration of the system prior to the next injection. A flow rate of 0.5 mL/min was used, the column temperature was 35° C. and the injection volume was 1 μL.

[0345] Results

[0346] Over expression of the marker gene uidA (GUS) in callus cultures of C. sativa Agrobacterium strain EHA105 harboring plasmid pME504 with uidA gene for GUS expression were vacuum infiltrated to callus cultures #201. After 3 days co-cultivation calli were grown to allow further proliferation on regeneration medium. GUS staining was done 3 and 10 days after transformation (FIGS. 19A-E). The analysis after 3 days and 10 days indicates high transient GUS expression in the calli.

[0347] In order to get stable transformation, calli were growth for further proliferation on a proliferation medium containing selective antibiotic (Kan 100 mg/1). Calli were analyzed 30 days after transformation by GUS staining and PCR analysis (FIGS. 20A-B). The results indicate that some of the cells became transgenic cells with stable GUS over exasperation.

[0348] Over Expression of CBD in Callus Cultures of C. sativa

[0349] Agrobacterium strain EHA105 harboring plasmid pK7WG2-THC240 or pK7WG2-CBD157 were vacuum infiltrated to callus cultures #203. After 4 days co-cultivation callus were sampled for HPLC analysis (FIGS. 21A-B).

[0350] Although the invention has been described in conjunction with specific embodiments thereof, it is evident that many alternatives, modifications and variations will be apparent to those skilled in the art. Accordingly, it is intended to embrace all such alternatives, modifications and variations that fall within the spirit and broad scope of the appended claims.

[0351] All publications, patents and patent applications mentioned in this specification are herein incorporated in their entirety by reference into the specification, to the same extent as if each individual publication, patent or patent application was specifically and individually indicated to be incorporated herein by reference. In addition, citation or identification of any reference in this application shall not be construed as an admission that such reference is available as prior art to the present invention. To the extent that section headings are used, they should not be construed as necessarily limiting. In addition, any priority document(s) of this application is/are hereby incorporated herein by reference in its/their entirety.

### REFERENCES

### Other References are Cited Throughout the Application

[0352] Andre, C. M., Hausman, J. F., & Guerriero, G. (2016). Cannabis sativa: the plant of the thousand and one molecules. Frontiers in plant science, 7, 19.
[0353] ElSohly, M. & Gul, W. Constituents of Cannabis sativa in Handbook of Cannabis (ed. Pertwee, R.) 3-22 (Oxford University Press, New York, 2014).
[0354] Flores-Sanchez, I. J. & Verpoorte, R. (2008) Secondary metabolism in Cannabis. Phytochem. Rev. 7, 615-639.
[0355] Hanuš, L. O., Meyer, S. M., Muσoz, E., Taglialatela-Scafati, O. & Appendino, G. (2016). Phytocannabinoids: a unified critical inventory. Nat. Prod. Rep. 33, 1357-1392.
[0356] Kojoma, M., Seki, H., Yoshida, S., & Muranaka, T. (2006). DNA polymorphisms in the tetrahydrocannabinolic acid (THCA) synthase gene in “drug-type” and “fiber-type” Cannabis sativa L. Forensic Science International, 159(2-3), 132-140.
[0357] Kinghorn, A. D., Falk, H., Gibbons, S., & Kobayashi, J. I. (2017). Phytocannabinoids. Springer International Pu.
[0358] Laverty K U, Stout J M, Sullivan M J, Shah H, Gill N, Holbrook L, Deikus G, Sebra R, Hughes T R (2019) A physical and genetic map of Cannabis sativa identifies extensive rearrangements at the THC/CBD acid synthase loci. 29 (1):146-156.
[0359] Morales, P., Hurst, D. P., & Reggio, P. H. (2017). Molecular targets of the phytocannabinoids: a complex picture. In Phytocannabinoids (pp. 103-131). Springer, Cham.
[0360] Russo, E. B. & Taming, T. H. C. (2011). Potential cannabis synergy and phytocannabinoid-terpenoid entourage effects: Phytocannabinoid-terpenoid entourage effects. Br. J. Pharmacol. 163, 1344-1364.
[0361] Sirikantaramas, S., Morimoto, S., Shoyama, Y., Ishikawa, Y., Wada, Y., and Shoyama, Y. (2004). The gene controlling marijuana psychoactivity: molecular cloning and heterologous expression of Δ1-tetrahydrocannabinolic acid synthase from Cannabis sativa L. J. Biol. Chem. 279, 39767-39774
[0362] Taura, F., Dono, E., Sirikantaramas, S., Yoshimura, K., Shoyama, Y., and Morimoto, S. (2007b). Production of Delta(1)-tetrahydrocannabinolic acid by the biosynthetic enzyme secreted from transgenic Pichia pastoris. Biochem. Biophys. Res. Commun. 361, 675-680.
[0363] Turner, S. E., Williams, C. M., Iversen, L., & Whalley, B. J. (2017). Molecular pharmacology of phytocannabinoids. In Phytocannabinoids (pp. 61-101). Springer, Cham.
[0364] van Bakel, H., Stout, J. M., Cote, A. G., Tallon, C. M., Sharpe, A. G., and Hughes, T. R. (2011). The draft genome and transcriptome of Cannabis sativa. Genome Biol. 12:R102.
[0365] Volkow, N. D., Baler, R. D., Compton, W. M., & Weiss, S. R. (2014). Adverse health effects of marijuana use. New England Journal of Medicine, 370(23), 2219-2227.
[0366] Weiblen, G. D., Wenger, J. P., Craft, K. J., ElSohly, M. A., Mehmedic Z., Treiber, E. L., et al. (2015). Gene duplication and divergence affecting drug content in Cannabis sativa. New Phytol. 208, 1241-1250.

The application's sequence listing, which the Patent Office published only in electronic form, follows.

SEQUENCE LISTING (178 sequences)

SEQ ID NO: 1 - protein, 551 aa, Cannabis sp.
MMTRWKRWDTLFVSKKIIGISFGFHLNPVKIFTKILFTPNTCLCVIIRTLRISFSIKVPIIEIRQSWILGHIRSCEIINTSNPVYMLFVILLLPGSSVPKFIHYSSSMREWNCFNLIHYTTVRVQHIHPNSYLFFIFFQNFDHCSFRYFLNIVLNESRLLPSSIKQNFLFKISSVVIYNTTVEDGCINPAQFFAISFFNTQLRKALVHQVNTIHSTKKNGREVTMYCSLILPMIICNIPSSEVSREHIFVILVSNILPFVKLDKPMYLHVLFNTEYSSLWDNNKFDFPCCNDSKVFSPPPRIAQNRSSPMDFRSRTFPSTLTKCASMILSAARPFRINAPPPPLKCPPTPTVGQYPPGKLKFSFISLIQTSPRVAPASTHAVWLISTLTVCMFLKSTIANGTDMDKPSASWPPLRVRICKPTFLEQRILAWIWETFEGVTITSGFGVVSEVNLRFCIVEFRTDIYNWSCVYMNFGFAGLLGIYSEKHLRKFSGLAIEIWILNERKKNIILQTNQKENVEQFIFLQSYFELLIENYPIYNIIYWSWGKIDIN

SEQ ID NO: 2 - protein, 543 aa, Cannabis sp.
MMTRWKRWDTLFVSKKIIGISFGFHLNPVKIFTKILFTPNTCLCVIIRTLRISFSIKVPIIEIRQSWILGHIRSCEIINTSNPVYMLFVIFLLLPGSSVPKFIHYSSSMREWNCFNLIHYTTVRVQHIHPNSYLFFIFFQNFDHCSLGISFLTSNLIEKAVFFPADLSSKISFLKLAVLFTTPLKMVVSIQLNSLQSVFLIPNSGKLLFIKSTRLSTPPRKMEEKPCTVVLFFPLSVIFLVLKVVSIKSLSYLAIFCHLLNNLTSPCISMFFLTLNIVAFDGTTTSLIFHAAMIPKFSPLHHVPKIDLLPWIFDLELFHQHLSVHQYYQPQGHFASMLHSLLHSVHLRQQGNTHQENNSHSSHSNNKLLQGLRLQPTQFGYEYLLPYACFSSLLQMGLEICRTNPQHHGHRFEFESANQLSWSREYWPGYGRHLKEQRVVLGLYQRIDFVLSNSGQTYTIGRVECIILDLLDCEYIPRSIGSFLEDLLKFGYMRERKILFCKQTKRRMLSNSFFFSPNDILNYYERTILFIIIYWSWGKIDIN

SEQ ID NO: 3 - protein, 537 aa, Cannabis sp.
MMTRWKRWDTLFVSKKIIGISFGFHLNPVKIFTKILFTPNTCLCVIIRTLRISFSIKVPIIEVRQSWILGHIRSCEIINTSNPVYMLFVIFLLLPGSSVPKFIHYSSSMREWNCFNLIHYTTVRVQHIHPNSYLFFIFFQNFDHCSFRYFLNIVLNESRLLPSSIKQNFLFKISSVVIYNTTVEDGCINPAQFFAISFFNTQLRKALVHQVNTIHSTKKNGREVTMYCSLILPMIICNIPSFSESALNLCHTCKQYFAICITQAHVSPCSFHIPLMGQQQVFSMLQFQSFLLLHHVPKIDLLPWIFDLELFHQHLSVHQYYQPQGHNFASMLHSLLHSVHLRQQGNTHQENNSHSSHSNNKLLQGLRLQPTQFGYEYLLPYACFSSLLQMGLEICRTNPQHHGHRFEFESANQLSWSREYWPGYGRHLKEQRVVLGLYQRIDFVLSNSGQTYTIGRVECIILDLLDCEYIPRSIGSFLEDLLKFGYMRERKILFCKQTKRRMLSNSFFFSPNDILNYYERTILFIILYIGVGANELT

SEQ ID NO: 4 - protein, 556 aa, Cannabis sp.
MMTRWKRWDTLFVSKKIIGISFGFHLNPVKIFTKILFTPNTCLCVIIRTLRISFSIKVPIIEIRQSWILGHIRSCEIINTSNPVYMLFVIFLLLPGSSVPKFIHYSSSMREWNCLFNLIHYTTVRVQHIHPNSYLFFIFFQNFDHCSFRYFLNIVLNESRLLPSSIKQNFLFKISSVVIYNTTVEDGCINPAQFFAISFFNTQLRKALVHQVNTIHSTKKNGREVTMYCSLILPMIICNIPSSEVSREHIFVILVSNILPFVKLDKPMYLHVLFNTEYSSLWDNNKFDFPCCNDSKVFSSSTTYSPKIFSHGFSINFSINIDVCINDIISRKAIILHQCSIASSTKVSTYANSRAIPTRKTKILIHLIDPIINFSKGSSGFNPRSLAMNIYFDRMHVSQVYYSKWDLRYVGQTLSIMATASSSNLQTNFLGAENTGLDMGDIRSDNNEWFWGCIRGESKILYCRIQDRHIQLVVLSVYEFWICWIVRNIFREAFKEVFLRISYNLDIEEKEKYYFANKPKGECAIHFSSVLMIFIIMNRELSYLYYILELGEMNHK

SEQ ID NO: 5 - protein, 555 aa, Cannabis sp.
MMTRWKRWDTLFVSKKIIGISFGFHLNPVKIFTKILFTPNTCLCVIIRTLRISFSIKVPIIEIRQSWILGHIRSCEIINTSNPVYMLFVIFLLLPGSSVPKFIHYSSSMREWNCFNLIHYTTVRVQHIHPNSYLFFIFFQNFDHCSFRYFLNIVLNESRLLPSSIKQNFLFKISSVVIYNTTVEDGCINPAQFFAISFFNTQLRKALVHQVNTIHSTKKNGREVTMYCSLILPMIICNIPSSEVSREHIFVILVSNILPFVKLDKPMYLHVLFNTEYSSLWDNNKFDFPCCNDSKVFSSSTTYSPKIFSHGFSINFSINIDVCINDIISRKAIISHQCSIASSTKVSTYANSRAIPTRKTKILIHLIDPIINFSKGSSGFNPRSLAMNIYFDRMHVSQVYYSKWDLRYVGQTLSIMATASSSNLQTNFLGAENTGLDMGDIRSDNNEWFWGCIRGESKILYCRIQDRHIQLVVLSVYEFWICWIVRNIFREAFKEVFLRISYNLDIEEKEKYYFANKPKGECAIHFSSVLMIFIIMNRELSYLYYILELGQMNHK

SEQ ID NO: 6 - protein, 555 aa, Cannabis sp.; identical to SEQ ID NO: 5

SEQ ID NO: 7 - protein, 555 aa, Cannabis sp.; identical to SEQ ID NO: 5

SEQ ID NO: 8 - protein, 401 aa, Cannabis sp.
SSNLIEKAVFFPADLSSKISFLKLAVLFTTPLKMVVSIQLNSLQSVFLIPNSGKLLFIKSTRLSTPPRKMEEKPCTVVLFFPLSVIFLVLKVVSIKSLSYLAIFCHLLNNLTSPCISMFFLTLNIVAFDGTTTSLIFHAAMIPKFSPPPPRIAQNRSSPMDFRSRTFPSTLTKCASMILSAARPFRINAPPPPLKCPPTPTVGQYPPGKLKFSFISLIQTSPRVAPASTHAVWLISTLTVCMFLKSTIANGTDMDKPSASWPPLRVRICKPTFLEQRILAWIWETFEGVTITSGFGVVSEVNLRFCIVEFRTDIYNWSCVYMNFGFAGLLGIYSEKHLRKFSGLAIEIWILNERKKNIILQTNQKENVEQFIFLQSYFELLIENYPIYNIIYWSWGKIDIN

SEQ ID NO: 9 - protein, 401 aa, Cannabis sp.; identical to SEQ ID NO: 8

SEQ ID NO: 10 - protein, 551 aa, Cannabis sp.
MNCSTFSFWFVCKIIFFFLSHSISKFQLILKKTSLNASRNIFLTIQQIQNSYTLNTTNCICLSIRQYKILDSPLIQPQNHSLLSLLQMSPISRPVFSAPRKLVCRFELEAVAMMLRVCPTYLKSHLLTETCIRSKIFIAKLRGLKPELPLEKFIIGSMRMRILVFLVGIALLLAVDTLVEEAMEHCEIMALRLIISLMHTSMLMEKFIENPWEKIYFGLYVVEEEKTLESLQHGKSNLLLSHQRLLYSVLKRTWRYMGLSSYLTNGKILLTSMTKICSRLTSELGILQIIMGRIRLQYMVTSLPFFLVEWIVLTTRAFLSWVLKKLIAKNAGLIQPSSTVVLITTLLILKRKFCLIDQLGRRRLSQLSTMLRNYLKLQWSKFWKNYMKKRELGCMCCTLTVVWMRFQNQQFHSLIELECMNFGTLLPGRSKKITKSITGFEVFIISQLLMCPKIQDWRISIIGTLIEKIILRVLIITHKHVFGVKSILVKILTGLRKPKLIPIIFLETNKVSHLFHRVIINYLPILCMLPSMKIYITTVTIIRYMNKLSFL

SEQ ID NO: 11 - protein, 555 aa, Cannabis sp.; identical to SEQ ID NO: 5

SEQ ID NO: 12 - protein, 553 aa, Cannabis sp.
MMTRWKRWDTLFVSKKIIGSALVSPNPVKIFTKILFTPNTCLCVIIRTLRISFSIKVPIIEIRQSWILGHIRSCEINKHFEPVYMLFVIFLLSQVAVYQSSYIIPARGNGIADSEISSIIPPGYNTYIPTPTSSSYNFSKILTIAVSGISFLTSNLIEKAVFFPADLSSKISFLKLAVLFTTPLKMVVSIQLNSLQSVFLIPNSGKLLFIKSTRLSTPPRKMEEKPCTVVLFFPLSVIFLVLKVVSIKSLSYLAIFCHLLNNLTSPCISMFFLTLNIVAFDGTTTSLIFHAAMIPKFSPPPPRIAQNRSSPMDFRSRTFPSTLTKCASMILSAARPFRINAPPPPLKCPPTPTVGQYPPGKLKFSFISLIQTSPRVAPASTHAVWLISTLTVCMFLKSTIANGTDMDKPSASWPPLRVRICKPTFLEQRILAWIWETFEGVTITSGFGVVSEVNLRFCIVEFRTDIYNWSCVYMNFGFAGLLGIYSEKHLRKFSGLAIEIWILNERKKNIILQTNQKENVEQFIFLQSYFELLIENYPIYNIIYWSWGKIDIN

SEQ ID NO: 13 - protein, 550 aa, Cannabis sp.
MMTRWKRWDTLFVSKKIIGISFGFHLNLVKIFTKILFTPNTCLCVIIRTLRISFSIKVPIIEIRQSWILGHIRSCEIINTSNPVYILFVIFLLLPGSSVPKFIHYSSSMREWNCFNLIHYTTVRVQHIHPNSYLFFIFFQNFDHCSFRYFLNIVLNESRLLPSSIKQISFLKLAVLFTTPLKMVVSIQLNSLQSVFLIPNSGKLLFIKSTRLSTPPRKMEEKPCTVVLFFPLSVIFLVLKVVSIKSLSYLAIFCHLLNNLTSPCISMFFLTLNIVAFDGTTTSLIFHAAMIPKFSPPPPRIAQNRSSPMDFRSRTFPSTLTKCASMILSAARPFRINAPPPPLKCPPTPTVGQYPPGKLKFSFISLIQTSPRVAPASTHAVWLISTLTVCMFLKSTIANGTDMDKPSASWPPLRVRICKPTFLEQRILAWIWETFEGVTITSGFGVVSEVNLRFCIVEFKTDIYNWSCVYMNFGFAGLLGIYSEKHLRKFSGLAIEIWILNERKKNIILQTNQKENVEQFIFLQSYFELLIENYPIYNIIYWSWGKIDIN

SEQ ID NO: 14 - protein, 554 aa, Cannabis sp.
MMTRWKRWDTLFVSKKIIGISFGFHLNPVKIFTKILFTPNTCLCVIIRTLRISFPKSRSLLRYANLGFWDTGVVKLTLRTQFICFSLSSCFSQVAVYQSSYIIPARGNGIADSEISSIIPRKGTTHTSQLLPLLHIIFPKFPLQFQVLVSHSLTLRKPSSSQLIYQENFLFKISSVVIYNTTVEDGCINPAQFFAISFFNTQLRKALVHQVNTIHSTKKNGREVTMYCSLILPMIICNIPSSEVSREHIFVILVSNILPFVKLDKPMYLHVLFNTEYSSLWDNNKFDFPCCNDSKVFSSSTTYSPKIFSHGFSINFSINIDVCINDIISRKAIISHQCSIASSTKVSTYANSRAIPTRKTKILIHLDPIINFSKGSSGFNPRSLAMNIYFDRMHVSQVYYSKWDLRYVGQTLSIMATASSSNLQTNFLGAENTGLDMGDIRSDNNEWFWGCIRGESKILYCRIQDRHIQLVVLSVYEFWICWIVRNIFREAFKEVFLRISYNLDIEEKEKYYFANKPKGECAIHFSSVLMIFIIMNRELSYLYYILELGQMNHK

SEQ ID NO: 15 - protein, 555 aa, Cannabis sp.
MMTRWKRWDTLFVSKKIIGISFGFHFNPVKIFTKILFTPNTCLCVIIRTLRISFSIKVPIIEIRQSWILGHIRSCEIINTSNPVYMLFVIFLLLPGSSVPKFIHYSSSMREWNCFNLIHYTTVRVQHIHPNSYLFFIFFQNFDHCSFRYFLNIVLNESRLLPSSIKQNFLFKISSVVIDNTTVEDGCINPAQFFAISFFNTQLRKALVHQVNTIHSTKKNGREVTMYCSLILPMIICNIPSSEVSREHIFVILVSNILPFVKLDKPMYLHVLFNTEYSSLWDNNKFDFPCCNDSKVFSSSTTYSPKIFSHGFSINFSINIDVCINDIISRKAIISHQCSIASSTKVSTYANSRAIPTRKTKILIHLIDPIINFSKGSSGFNPRSLAMNIYFDRMHVSQVYYSKWDLRYVGQTLSIMATASSSNLQTNFLGAENTGLDMGDIRSDNNEWFWGCIRGESKILYCRIQDRHIQLVVLSVYEFWICWIVRNIFREAFKEVFLRISYNLDIEEKEKYYFANKPKGECAIHFSSVLMIFIIMNRELSYLYYILELGQMNHK

SEQ ID NO: 16 - protein, 553 aa, Cannabis sp.
MMMRWKRWDTLFVSKKIIGINFSFHLNPVKIFTKILFTPNTCLCVIIRTRMISFSIKVPIIEIRQSWILGHIRSRKIINTSNPVYMLFIIFLLLPGSSVPKFIHYSSSMREWNCFNLLHYTTVRVQHIHPSSYIFFIFFQNFDHCSFWNWFLNIVLNESRLLPSSIKQNFLFKISSVKIYNTTVEDGCINPAKFFAISFFNTQLTKALVHQVDTIHSTMKNREVTMYCSLILPMIICNILCYEVSHEYIFVILVSNILPFVKLDKPMYLHVLFNTEYSRLWDSNQFDFPCCNDSKVFSSTTTYSPKQIFSHGFSINFSINIDVCINNIISRKAIISHQCSIASSTKVSTYANSRAIPTRKTKILILLIDPIINFSKGSSGFNPRSLAMNIYFDRMHVSQVYYNKWDLRYVGHTLSIMATASSSNLQANFLRANSCLDMGVIRSDNNEWFWGCIRDESKILYCRIQDRHIQLVVLSVYEFWICYIVGNMFEAFKEVFSRISYNLDMEEKEKYYFANKPKGKCAIHFSSVLMIFIIRNELSYLYYILELGQINLK

SEQ ID NO: 17 - protein, 577 aa, Cannabis sp.
MNCSAFSFWFVCKIIFFFLSFHIQISIANPRENFLKCFSKHIPNNVANPKLVYTQHDQLYMSILNSTIQNLRFISDTTPKPLVIVTPSNNSHIQATILCSKKVGLQIRTRSGGHDAEGMSYISQVPFVVVDLRNMHSIKIDVHSQTAWVEAGATLGEVYYWINEKNENLSFPGGYCPTVGVGGHFSGGGYGALMRNYGLAADNIIDAHLVNVDGKVLDRKSMGEDLFWAIRGGGGENFGIIAAWKIKLVAVPSKSTIFSVKKNMEIHGLVKLFNKWQNIAYKYDKDLVLMTHFITKNITDNHGKNKTTVHGYFSSIFHGGVDSLVDLMNKSFPELGIKKTDCKEFSWIDTTIFYSGVVNFNTANFKKEILLDRSAGKKTAFSIKLDYVKKPIPETAMVKILEKLYEEDVGAGMYVLYPYGGIMEEISESAIPFPHRAGIMYELWYTASWEKQEDNEKHINWVRSVYNFTTPYVSQNPRLAYLNYRDLDLGKTNHASPNNYTQARIWGEKYFGKNFNRLVKVKTKVDPNNFFRNEQSIPPLPPHHHLSLNRYISLINLIIIPYIHLLYIVYLLILCML

SEQ ID NO: 18 - protein, 520 aa, Cannabis sp.
EEVGCFARFKNYWDQLWFSPLTCQSFYQSTFHPRYVLGCNYDSWDQFFLNQGPYNDTPFLDFGTHKASNYKHFKPSLYAFHYLLASPRLRIKLRTFQLDEGKELLILRSCPLYHRKGTIHTPQLLHLLHTISPKFQLQFLELVSRSLTLRKLLSAQLIYQAKFPFENCYNLQHHCRRWYQSSSILCNQFFYPTQESSCSSSLDYLLHHGKCKRSNRVLSYSFLDYLYSWLSESVINLCHTCKQYFAIYITQAHVSPYSFHIPLMGQQPVFSTLQFQSFHLHHHVPKIDLPPWIFDLELFHQHLSVHQYYQLRGHNFALMLYSLLHSVHLRQQGNTHQENDSHSNNKLLQGLRLQPTQFGYEYLFSPNACFSSLLQMGLEMCRTNPQHHGHRFEFEFASPLSWSIEWLGYGRHLKEQRVVLGLYQRIDFVLSNSGQTYTIGRVECIRVLDLLDCYEYIGRSILGNFLEDLLKFYMRERKIFCKQTRRMLSSTSFFLVLMIFELLIKNCPFYNFIYWSGDEI

SEQ ID NO: 19 - protein, 540 aa, Cannabis sp.
GRGGMLCSFLKKLLGSTLVFTLTNLSKFLPKYFSPQIRAWVLLGLLGSVFPKSRSLLRYAILGFWDTGVMKLTLQTQFICFSLSSCFSQVAAYQTSYMIPARGKGIVDSEILSIIPPGYNTYTPTPTSSSYNFSKILTIAVSGIGFLTSNLTEKATFCPADLSSKISFKLVVLFTTPLKMVVSIQLNSLQSVFLIPNSGKLLFIKLTRLSTPPWKMQEKPCTVVLFFPLSIIFLVMKVMSNKSLSYLAIFCHLLNNLTSPCISIFLLTLNIVALDGTATSLIFHAAMIPKFSPPPPRIAQNRSSPMDFRSRTFPSTLTKCASMILSAARPFRINALPPPLKCPPTPTVGQYPPGKLRFSLIQTSPRVAPASTHAIWLRISIFTECMFLKSTITNGTDVDKPSASWPPLRVRICKPTFLEHRIVAWIWETFEGVTITSGFGVVSEVNLRFCIVKFRTDIYNWSCVYTSFRFAGLLIYWEKHFRKFSGLAIEILILNERKKNIILTNLKENVEYFIFFSLNDFITMNELSFLLYILERGLRN

SEQ ID NO: 20 - protein, 569 aa, Cannabis sp.
STFSFRFVYKIIFFFLSFNIKISIANPQENFLNCFSQYIHNNPANLKLVYTQHDQLYMSVLNLTIQNLRFTSDTTPKPLVIVTPSNVSHIQATILCSKKVGLQIRTRSGGHDAEGLSYTSQVPFVIVDLRNMHSVKIDIRSQTAWVEAGATLGEVYYWINEKNENLSFPGGYCPTVGVGGHFSGGGYGALMRNYGLAADNIIDAHLVNVDGKVLDRKSMGEDLFWAIRGGGGENFGIIAAWKIRLVAVPSRATIFSVKRNMEIHGLVKLFNKWQNIAYKYDKDLLLMTHFITRNIIDNQGKNKTTVHGYFSCIFHGGVDSLVNLMNKSFPELGIKKTDCKELSWIDTTIFYSGVVNYNTTNFQKEILLDRSAGQKVAFSIKLDYVKKPIPETAIVKILEKLYEEDVGVGVYVLYPYGGIMDKISESTIPFPHRAGIMYEVWYAATWEKQEDNEKHINWVRSVYNFMTPYVSQNPRMAYLNYRDLDLGKTDPKSPNNYTQARIWGEKYFGKNFDKLVKVKTKVDPNNFFRNEQSIPPLPPRRHLFLNISISLIHKLMLIPYMYLLYIFVY

SEQ ID NO: 21 - protein, 547 aa, Cannabis sp.
GRRGGRGGMLCSFLKKLLGSTLVFTLTNLLKFLLKYFSPQIHACVLLGLLGLVFPKSRSLLTYAILFWDTGVVKLTLRTQFICFLSSSFSVAAYQSSYMIPARRNGIADSEISSIVPPGIKRYIPTPTSSSYNFSKILTIAIFRIGFLTSNLIEKAVFGPADRSSKISFLKLAVLNLQFNYRRWWYQFSSILCNQFFYPTQESSCSSSQPNYPLHHGKWKGSNRVLLFYSFLDYLYFWLSESVINLCHTCKQYFAIYQITQAHVSPYSFHITLTGHQPVFSTLLFQSFSSTTTYSPKHIFSHGFSIKLSINIDYVCINDIISREAIISYQCSIASSTKVSTCANSRAKPTRKTKILILLIDLEVNFSKGSSSFNPCSLATNIYFDQMYVSQVYYNEWDLRYVGQTLSIVATASSSNLQVNFLGANWGLDVGDIRSDDNEWFWGCIRVESKILYFIQDRHIQVVIMSVYEFWICCIVGNMLREAFKEIFSRISYGNLDIEEKKNIILQTNQKENVEYFIFLSFLNYYEKIMLFIALYIGAGAKKLTKY

SEQ ID NO: 22 - protein, 547 aa, Cannabis sp.
GRRGGRGGMLCSFLKKLLGSTLVFTLTNLLKFLLKYFSPQIHACVLLGLLGLVFPKSRSLLTYAILFWDTGVVKLHFEPNLYAFDYLLPFPRLRTKVHTFQLDDGMELLILKSHPLYRRKGSKDTSQLLHLLHIIFPKFPLRFSELGSRSLTLRKLSSAQLIDQAKFPFNQCIYNSTIEDGGINSAQFFAISFFNTQLRKALVHQVNQTIRSTMENGREVIVYCCFILSLIICSIFGYEVSHEIFVILVSNILPFIKLDKPMYLHILFNTEYSRLQDINQSDFPRCNYSKVSPPPPRIAQNISSLMDFRSRNFPSTLTMCASMILLAASAIISYQCSIASSTKVSTCANSRAKPTRKTKILILLIDLEVNFSKGSSSFNHAVWLRTSFDVCFSSLLMGLEICRTNPQHRGYRSSSNLQVNFLGANWGLDVGDIRSDDNEGFGVASELNLRFCIFEFRTDIYKWSLVYTSFGFAALLANMLREAFKEIFSRISYGNLDIEEKKNIILQTNQKENVEYFIFLSFLNYYEKIMLFIALYIGAGAKKLTKY

SEQ ID NO: 23 - protein, 477 aa, Cannabis sp.
GRRGGRGGMLCSFLKKLLGSTLVFTLTNLLKFLLKYFSPQIHACVLLGLLGLVFPKSRSLLRYANLFDTGVVKLTLRTQFICFLSSCFSVAAYQSSYMIPARRNGIADSEISSIVPPYGIKRYIPTPTSSSYNFSKILTIAIFGIGCLTSNLIEKAVFGPADRSSKISFLKLAVLNLQFHCRRWWYQFSSILCNQFFYPTQESSCSSSQPNYPLHHGKWKGSNRVLLFYSFLDYLYFWLSESVINLCHTCKQYFAIYQITQAHVSPYSFHITLTHQPVFSTVLFQSFSSTTTYSPKHIFSHGFSIKLSINIDYVCINDIISREAIISYQSIASSTKVSTCANSRAKPTRKIKILILLIDPEVNFSKGSSSFNPCSLATNIYFDQMYVSQVYYNEWDLRYVGQTLSIVATASSSNLQVNFLGANWGLDVGDIRSDDNEWFWGCIRVESKCPTFSATNKILNYAVRKEKDFYVVGALMS

SEQ ID NO: 24 - protein, 477 aa, Cannabis sp.; identical to SEQ ID NO: 23

SEQ ID NO: 25 - protein, 468 aa, Cannabis sp.
DSTLMQPQNHSLSSLLQMSPTSKPQFYAPRKLTCRFELEAVATMLRVCPTYLKSHSLTETYISKMFVAKLHGSWSYPWRSLLPDQEEESFSWWVLPYCWHRWTLWRRLWIIDTKLWPRGYHCTHSQCWKVSRSKIHGRRYVLGYTWWWRRNFGIITLWKIRLVDVMSKSTIFSVKKNMEIHGLVKLFDKWQNIAYKYDKDLLLMTHFITKNTTDNQGKNKTTVHGYFPSIFHGGADSLVDLMNKSFPELGIKKTDCKELSIDTTIFYSGIVNSTLLILKRKFCLIDQLGRRQLSQLSTTLSTNSENRNGQNFGKIIRRCRSWDVSFDPVRRYNGDFRISNSIPSSSWNHVTLVRSYLGKARRSKAYKLGSKCLFHNSLCVLKSKIRISQLGPFRKNSQESLHTSMYLGKVFKFQVCGENQGSQFFKRTKHPTSSTASSLIVLNRYISVIIFYGRGIRTWNLLLKEVNH

SEQ ID NO: 26 - protein, 547 aa, Cannabis sp.
MMTQGKRWECFVRFRNYRDQPWFLLLLTYNFYQNTFHPKYVLVCNYDSRNFFLNQGPYNDTPFLDFGTHKESNYKHSESSLYAFHYLLASPMKLCTKFHTFQLDEGMELLILKSHPLYHHKGKTQTSQLLHLLHIIFPKLPLRFLESVSHSLTSRKPPSAHLIYQANFFLKLVVLFTTTTVEDDSINPAQLFAICFFNTQFRKALVHQVDTIHSTMENGGEVTVYCCLILPLIICNIPGYKVSKEFFFIHVSNILPFVNLDKLMYLHVLFNTEYSRHWDSNKSNFPRCNDSKVFSSTTTYSPKQIFPHGFRSKTFPSTLTKCASMILSAARPFRINAPPPPLKCPPAPTVGQYPAGKLRFSLFSLIQTSPRVAPASTHAVWLTSILTECMFLKSTITNGTDMDMPSASPPLRVRICKPTFLEHRIVPWIWETFKGVMITSGFGVVSEVHLRFCMVEFRIDINWSCVYTSFAFVTLVGIYCEKHLRKFSGLAIEIWILNERKKNIILQTYQNRMLSTSFFFSRNVGNYYEWKTIYLLYRLEWGVKKLT

SEQ ID NO: 27 - protein, 551 aa, Cannabis sp.
MMTQGKRWNALFVSKEIIGINLGFYFYPIKIFTKILFTPNTCLCVIIRTLEISFSIKVPIIEIRHSWILGHIRSREIINIPNPVYMLFIIFLLLPSYVPNFIHDSSSMREWNCFNLIHYTTIRVKHKHPNSYIFFIFFQNCDHCGFWNRFLNIVLNRESRLPPTSIKQNFFFKISCVVIYNTTVEDDSINPAQLFAICFFNTQFRKALVHQVDTIHSTMENGGEVTVYCCLILPLIICNIPGYKVSKEFFFIHVSNILPFVNLDKLMYLHVLFNTEYSRHWDSNKSNFPRCNDSKVFSSTTTYSPKQIFPHGFSINFSINIDVRINDIISREAIISHQCSIASSTKVSTRANSRAVPSRKTKILIVLIDPIINFSKGSSGFNPCSLAMNIYFDRMHVSQVYYNKWDLRYVGHALSIMTTASSSNLQANFLGANSALDMGDIRSDDNKWFWGCVRGKSKILYGRIQDRHIKLVVLSVYEFCICYIGGNILEAFKEVFLRISYNLDIEEKEKYYLANIPKTECVLHFSLVVMLAITMNGKLFYLLYRLEWGRN

SEQ ID NO: 28 - protein, 543 aa, Cannabis sp.
MMTGKRWDALFVSKKLSGSTLVFTFTNLLKFLPKYFSPQIRACVLLGLSKLVFPKSRSLLRYAILGFWDTGVVKLTFRIQLYAFHYLLASPMKLCTKFHTFQLDEGMELLILKSHPLYHHKGKHKHPNSYIFFIFFQNCDHCGFWNRFLNIVLNRESRLPPTSIKQNFFFKISCVVIYNTTVEDDSINPAQLFAICFFNTQFRKALVHQVDTIHSTMENGGEVTVYCCLILPLIICNILVISERVIILFIHVSNILPFVNLDKLMYLHVLFNTITLMGQQQVFPRCNDSKVFSSTTTYSPKQIFPHGFSINFSINIDVRINDIISREAIISHQCSIASSTKVSTRANSRAVPSRKTKILIVLIDPIINFSKGSSGFNPCSLAYEHLFPNACFSSLLQMGLQICRTCPQHHDHRFEFESASQLSWSIECLGYGRHLKEQVVLGLFQRIDFVWSNLGTYKIGRVECIRVLHLLHWWEYIVRSIGSFLEDLLNWILNERKKNIILQTYQKQNVEYFIFLSCWQLLMENYPIYSFIDVGVKKLTKYV

SEQ ID NO: 29 - protein, 552 aa, Cannabis sp.
MMTGKRWDALFVSKEIIGINLGFYFYPIKIFTKILFTPNTCLCVIIRTLEISFSIKVPIIEIRHSWILGHIRSREIINIPNPVYMLFIIFLLLPSYVPNFIHDSSSMREWNCFNLIHYTTIRVKHKHPNSYIFFIFFQNCDHCGFWNRFLNIVLNRESRLPPTSIKQNFFFKISCVVIYNTTVEDDSINPAQLFAICFFNTQFSKALVHQVDTIHSTMENGGEVTVYCCLILPLIICNIPGYKVSKEFFFIHVSNILPFVNLDKLMYLHVLFNTEYSRHWDSNKSNFPRCNDSKVFSSTTTYSPKQIFPHGFSINFSINIDVRINDIISREAIISHQCSIASSTKVSTRANSRAVPSRKTKILIVLIDPIINFSKGSSGFNPCSLAMNIYFDRMHVSQVYYNKWDFRYVGHALSIMTTASSSNLQANFLGANSALDMGDIRSDDNKWFWGCFRGKSKILYGRIDRHIKLVVLSVYEFCICYIGGNILEAFKEVFLRISYNLDIEEKEKYYLANIPKTECVLHFSLVVMLAITMNGKLSYLLYRLEWGRNLNI

SEQ ID NO: 30 - protein, 544 aa, Cannabis sp.
MKYSTSVFGMFARYFLSLIQYPNFKSSSRKLPMLLTIYSHQMQMQNSYTLNTTNFICLSIDHTKSNLPLKQPQNHLLSSLLMSPISKALFYAPRKLACRFELEAVVMMLRACPTYLKSHLLTETCIRSKMFIAKLHGLKPELPLEKFIIGSMRTMRILVFLLGTALLLARVDTLVEEAMEHCEIMASRLIISLMRTSMLMEKFIENPWGKICFGLYVVVEEKTLESLQRGKLDLLLSHQCLLYSVLKRTWRYMSLSSLTNGKILLTCMKKNYYSLLTLPGILQIIKGRIRQQYTVTSPPFSMVEWIVSTTRAFLNWVLKNRLQQLSWIDTIIFYSGVVNYNTTNFKKEILLDRSGGRKAAFLDLDYVKKPIPETAMVTILEKLYEEDVGVGMFVFYPYGGIMDEISESAIPFPHRAGIMYEIWYIASWEKQEDNEKHINWIRNVYNFTTPYVSQNPRMAYLNYRDLDLGKTNFESPNNYTQARIGVKSIWKFVSKSKNQGSRFLKRTKHPTSSPTSSLIILNRSISLIKLLVLITIMLGFCALN

SEQ ID NO: 31 - protein, 566 aa, Cannabis sp.
MKYSTFCFWYVCKIIFFFLSFNIQISIANPQENFLKCFSQYIPTNVTNAKLVYTQHDQFYMSILNSTIQNLRFTSETTPKPLVIITPLNVSHIQGTILCSKKVGLQIRTRSGGHDAEGMSYISQVPFVIVDLRNMHSVKIDVHSQTAWVEAGATLGEVYYWINENNENLSFPAGYCPTVGAGGHFSGGGYGALMRNYGLAADNIIDAHLVNVDGKVLDRKSMGEDLFWAIRGGGGENFGIIAAWKIRLVAVPSMSTIFSVKKNMEIHELVKLVNKWQNIAYMYEKELLLFTHFITRNITDNQGKNKTTIHSYFSSIFHGGVDSLVDLMNKSFPELGIKKTDCKQLSWIDTIIFYSGVVNYNTTNFKKEILLDRSGGRKAAFSIKLDYVKKPIPETAMVTILEKLYEEDVGVGMFVFYPYGGIMDEISESAIPFPHRAGIMYEIWYIASWEKQEDNEKHINWIRNVYNFTTPYVSQNPRMAYLNYRDLDLGKNFRESLHTSTYLGKVFWKFVSKSKNQGSRFLKRTKHPTSSPASSLIILNRSISLIKLLVLITIMLGFCALTKTLF

SEQ ID NO: 32 - protein, 552 aa, Cannabis sp.
MKYSTFCFWYVCKIIFFFLSFNIQISIANPQENFLKCFSQYIPTNVTNAKLVYTQHDQFYMSILNSTIQNLRFTSEQPQNHLLSSLLMSPISKALFYAPRKLACRFELEAVVMMLRACPTYLKSHLLTETCIRSKMFIAKLHGLKPELPLEKFIIGSMRTMRILVFLLGTALLLARVDTLVEEAMEHCEIMASRLIISLMRTSMLMEKFIENPWGKICFGLYVVVEEKTLESLQRGKLDLMLSHQCLLYSVLKRTWRYMSLSSLTNGKILLTCMKKNYYSLLTLPGILQIIKGRIRQQYTVTSPPFSMVEWIVSTTRAFLNWVLKKQIANSAGLILSSSTVVLITTQLILKKKFCLIDQVGGRRLSRLSTMLRNRFQKPQWSQFWKNYMKKMELGCLCFTLMVVWMRFQNQQFHSLIELESCMKFGTLHGRSKKIMKSITGFGMFIISRLLMCPKIQEWRISIIGTLIEKLISRVLIITHKHVFGVKSILVKILIGKKPRLITIISLETNKASHLFPCVIINYLKIYFSYQIISPYNINNVGFLCLNNSILM

SEQ ID NO: 33 - protein, 554 aa, Cannabis sp.
MKYSTFCFWYVCKIIFFFLSFNIQISIANPQENFLKCFSQYIPTNVTNAKLVYTQHDQFYMSILNSTIQNLRFTSDTTPKPLVIITPLNVSHIQGTILCSKKVGLQIRTRSGGHDAEGMSYISQVPFVIVDLRNMHSVKIDVHSQTAWVEAGATLGEVYYWINENNENLSFPAGYCPTVGAGGHFSGGGYGALMRNYGLAADNIIDAHLVNVDGKVLDRKSMGEDLFWAIRGGGGENFGIIAAWKIRLVAVPSMSTIFSVKKNMEIHELVKLVNKWQNIAYMYEKELLLFTHFITRNITDNQGKNKTTIHSYFSSIFHGGVDSLVDLMNKSFPELGIKKTDCKQLSWIDTIIFYSGVVNYNTTNFKKEILLDRSGGRKAAFSIKLDYVKKPIPETAMVTILEKLYEEDVGVGMFVLPLWWYNGDFRISNSIPSSSWNHVNLVHSFMGEARRKAYKLDSECLFHDSLCVPKSKNGVSQLGPFRKNFRESLHTSTYLGKVFWKFVSKSKNQGSRFLKRTKHPPLPLRHHLSIDLFLLSNYSLHKCWVFVPLNSILM

SEQ ID NO: 34 - protein, 547 aa, Cannabis sp.
MKYSTFCFWYVCKIIFSFSHSISKFQLILKKTMLLTIYSHQCNKCKTRIHSTRPILYVYPKFDHTKSIYLHNPKTTCYHHSFKCLPYPRHYSMLQESWLADSNSKRWSCGHVLHISSPICYSRLEKHAFGQNRCSPNCMGSRSYPWRSLLLDQEQESFSCWVLPYCWRGWTLWRRLWSIDAKLWPRGYHCALSQCWKSFRSKIHGGRFVLGYTWWWRRKLWNHCSVENTCCCPINVYYIQCKEHGDTACQVSQMAKYCLHVKRIITLYSLYNQEYYRSREEDNNTQLLLLIFHGGVDSLVDLMNKSFPELGIKKTDCKQLSWIDTIIFYSGVVNYNTTNFKKEILLDRSGGRKAAFSIKLDYVKKPIPETAMVTILEKLYEEDVGVGMFVFYPYGGIMDEISESAIPFPHRAGIMYEIWYIASWEKQEDNEKHINWIRNVYNFTTPYVSQNPRMAYLNYRDLDLGKTNFESPNNYTQARIWGEKYFGKNFNRLVKVKTKVDPDNFFRNEQSIPPLPLRHHLSIDLFLLSNYSLHKCWVFVPLKLYFN

SEQ ID NO: 35 - protein, 344 aa, Cannabis sp.
MMTGKRWDALFVSKEIIGINLGFYFYPIKFFTKILFTPNTCLCVIIRTLEISFSIKVPIIEIRHSWILGHIRSREIVNILNPVYMLFIIFLLLPSYVPNFIHDSSSMREWNCFNLIHYSTIRVKHKHPNSYIFFIFFQNCDHCGFWNRFLNLVLNRESRLPPTSIKQKFFFKISSVVIYKTTVEDDSINPAQLFAICFFNTQFRKALVHQVDTIHSTMENGGEVTMYCCLILSLIICNIPGYKVSKEFFFIHVSNILPFVNLDKLMYLHVLFITEYSRHWDSNKSNFPRCNDSKVFSSTTTYSPKQIFPHGFFNQSNQCKIIMSIMIYIKYHLAHTFIQLWHLI

SEQ ID NO: 36 - protein, 351 aa, Cannabis sp.
KSMGEDLFWAIRGGGGENFGIIAAWKIRLVAVPSMSTIFSNKKNMEIHELVKLVNKWQNIAYMYEKELLLFTHFITRNITDNQGKNKTTIHSYFSSIFHGGVDSLVDLMNKSFPELGIKKTDCKQLSWIDTIIFYSGLVNYNTTNFKKELLLDRSGGRKAAFSIKLDVKKPIPETAMVTILEKLYEEDVGVGMFVFYPYGGIMDEISESAIPFPHRAGIMYEIWYIASWEKQEDNEKHINWIQNVYNFTTPYVSQNPRMAYLNYRDLDLGKTNFESPNNYTQARIWGEKYFGKKFNRLVKVKPRLIPIISLETNKASHLFPYVIINILNRSISLIKLLVLITIMLGFVPLK

SEQ ID NO: 37 - protein, 568 aa, Cannabis sp.
MKYSTFCFWYVCKIIFFFLSFNIQISIANPEGNFLKCFSQYIPTNVTNAKLVYTQHDQFYMSILNSTIQNLRFTFDTTPKPLVIITPLNVSHIQGTILCSKKVGLIRTRSGGHDAEGMSYISQVPFVIVNLRNMHSVKIDVHSETAWVEAGATLGEVYYWINENNENLSFLAGYCPTVGAGGHFSGGGYGALMRNYGLAANNIIDAHLVNVDGKVLDRKSMGEDLFWAIRGGGENFGIIAAWKIRFVAVPSMSTIFSVKKNMEIHELVKLVNKWQNIAYMYEKELLFTHFITRNITDNQGKNKTTIHSYFSSIFYGGVDSLVDLMNKSFPELGIKKTDCKQLSWIDTIIFYSGLVNYNTTNFKKELLLDRSGGRKAAFSIKLDVKKPIPETAMVTILEKLYEEDVGVGMFVFYPYGGIMDEISESAIPFPHRAGIMYEIWYIASWEKQEDNEKHINWIRNVYNFTTPYVSQNPRMAYLNYRDLDLGKTNFESPNNYTQARIWGEKYFGKNFNRLVKVKTKVDPDNFFRNEQSIPPLPLRHHLSIDLFLLSNYSLHKCWVFVPLKLYFN

SEQ ID NO: 38 - protein, 567 aa, Cannabis sp.
MKYSTFCFWYVCKIIFFFLSFNIQISIANPEGNFLKCFSQYIPTNVTNAKLVYTQHDQFYMSILNSTIQNLRFTFDTTPKPLVIITPLNVSHIQGTILCSKKVGLIRTRSGGHDAEGMSYISQVPFVIVNLRNMHSVKIDVHSETAWVEAGATLGEVYYWINENNENLSFLAGYCPTVGAGGHFSGGGYGALMRNYGLAANNIIDAHLVNVDGKVLDRKSMGEDLFWAIRGGGENFGIIAAWKIRLVAVPSMSTIFSVKKNMEIHELVKLVNKQNIAYMYEKELLFTHFITRNITDNQGKNKTTIHSYFSSIFYGGVDSLVDLMNKSFPELGIKKTDCKQLSWIDTIIFYSGLVNYNTTNFKKELLLDRSGGRKAAFSIKLDVKKPIPETAMVTILEKLYEEDVGVGMFVFYPYGGIMDEISESAIPFPHRAGIMYEIWYIASWEKQEDNEKHINWIRNVYNFTTPYVSQNPRMAYLNYRDLDLGKTNFESPNNYTQARIWGEKYFGKNFNRLVKVKTKVDPDNFFRNEQSIPPLPLRHHLSIDLFLLSNYSLHKCWVFVPLKLYFN

SEQ ID NO: 39 - protein, 571 aa, Cannabis sp.
MKYSTFCFWYVCKIIFFFLSFNIQISIANPQENFLKCFSQYIPTNVTNAKLVYTQHDQFYMSILNSTIQNLRFTSDTTPKPLVIIAPLNVSHIQGTILCSKKVGLQIRARSSGHDAEGMSYISQVPFVIVDLRNMHSVKIDVHSQTAWVEAGATLGEVYYWINENNENLSFPAGYCPTVGAGGHFSGGGYGALMRNYGLAADNIIDAHLVNVDGKVLDRKSMGEDLFWAIRGGGGENSGIIAAWKIRLVAVPSMSTIFSVKKNMEIHELVKLVKKWQNIAYMYEKELLLFTHFITRNITDNQGKNKTTIHCYFSSIFHGGLDSLVDLMNKSFPELGIKKTDCKQLSWIDTIIFNSGLVNYNTTNFKKEILLRSGGRKAAFSIKLDYVKKPIPETAMVTILEKLYEEDVGVGMFVFYPYGGIMDEISESAIPFPHRAGIMYEIWYIASWEKQEDNEKHINWIRNVYNFTTPYVSQNPRMAYLNYRDLDLGKTNFESPNNYTQARIWGEKYFGKNFSRLVKVKTKVDPDNFFRNEQSIPPLPLRHHLSIDLFLLSNYSLHKCWVFAPLKLYFN

SEQ ID NO: 40 - protein, 571 aa, Cannabis sp.
MKYSTFCFWYVCKIIFFFLSFNIQISIANPQENFLKCFSQYIPTNVTNAKLVYTQHDQFYMSILNSTIQNLRFTSDTTPKPLVIITPLNVSHIQGTILCSKKVGLQIRTRSGGHDAEGMSYISQVPFVIVDLRNMHSVKIDVHSQTAWVEAGATLGEVYYWINENNENLSFPAGYCPTVGAGGHFSGGGYGALMRNYGLAADNIIDAHLVNVDGKVLDRKSMGEDLFWAIRGGGGENFGIIAAWKIRLVAVPSMSTIFSVKKNMEIHELVKLVNKWQNIAYMYEKELLLFTHFITRNITDNQGKNKTTIHCYFSSIFHGGLDSLVDLMNKSFPELGIKKTDCKQLSWIDTIIFNSGLVNYNTTNFKKEILLRSGGRKAAFSIKLDYVKKPIPETAMVTILEKLYEEDVGVGMFVFYPYGGIMDEISESAIPFPHRAGIMYEIWYIASWEKQEDNEKHINWIRNVYNFTTPYVSQNPRMAYLNYRDLDLGKTNFESPNNYTQARIWGEKYFGKNFNRLVKVKTKVDPDNFFRNEQSIPPLPLRHHLSIDLFLLSNYSLHKCWVFALTKTLFC

SEQ ID NO: 41 - protein, 543 aa, Cannabis sp.
GMFARYFFSLIQYPNFNSSSRKLPMLLTIYSHQCNKCKTRIHSTRPILYVYPKFDHTKSIYLHNPKTTCYHHSFKCLPYPRHYSMLQKVGLQIRTRSGGHDAEGMSYISQVPFVIVDLRNMHSVKIDVHSQTAWVEAGATLGEVYYWINENNENLSFPAGYCPTVGGVDTLVEEAMEHCEIMASRLIISLMRTSMLMEKFIENPWGKICFGLYVVVEEKTLESLQRGKLDLLLSHQCLLYSVLKRTWRYMSLSSLTNGKILLTCMKKNYYSLLTLPGILQIIKGRIRQQYTVTSPPFSMVEWIVSTTRAFLNWVLKKQIANSAGLILSSSTVVCKLTQLILKKKFCLIDQVGGRRLSRLSTMLRNRFQKPQWSQFWKNYMKKMELGCLCFTLMVVWMRFQNQQFHSLIELESCMKFGTLHGRSKKIMKSITGFGMFIISRLLMCPKIQEWRISIIGTLIEKLISRVLIITHKHVFGVKSILVKILIGKKPRLIPIISLETNKASHLFPCVIINYLKIYFSYQIISPYNINNVGFLCLNNSILM

SEQ ID NO: 42 - protein, 519 aa, Cannabis sp.
GMFARYFFFSHSISKFQLILKKTSLNASHNIFPPMQMQNSYTLNTTNFICLSIRPYKILDLPLTQPQNHLLSSLLMSPISKALFYAPKKLACRFELEAVVMMLRACPTYLKSHLLTETCIRSKMFIAKLHGLKPELPLEKFIIGSMRTMRILVFLLGTALLLARVDTLVEEAMEHCEIMASRLIISLMRTSMLMEKFIENPWGKICFGLYVVVEEKLWNHCSVENTCCCPINVYYIQCKEHGDTACQVSQMAKYCLHVKRIITLYSLYNQEYYRSREEDNNTQLLLLHFPWWSGSSRLDEQELSIGYKNRLQTVELDYYHLLQWSCKLQHNFKRNFAIRWAEGGFLDVRLCETDSRNRNGHNFGKIIRRCRSWDVCVLPLWWYNGDFRISNSIPSSSWNHVNLVHSFMGEARRKAYKLDSECLFHDSLCVPKSKNGVSQLGPFRKNFETLHTSTYLGKVFWKFVSKSKNQGSRFLKRTKHPTSSPASSLIILNRSISLIKLLVLITIMLGFCALTKTLF

SEQ ID NO: 43 - protein, 528 aa, Cannabis sp.
GMFARYFFFSHSISKFQLILKKTSLNASHNIFPPMQMQNSYTLNTTNFICLSIRPYKILDLPLTQPKTTCYHHSFKCLPYPRHYSMLQKSWLADSNSKRWSCGHVLHISSPICYSRLEKHAFGQNRCSPNCMGSRSYPWRSLLLDQEQESFSCWVLPYCWRGGHFSGGGYGALMRNYGLAADNIIDAHLVNVDGKVLDRKSMGKICFGLYVVVEEKTLESLSVENTCCCPINVYYIVLKKNMEIHELVKLVNKWQNIAYMYEKELLLFTHFITRNITDNQGKNKTTIHSYFSSIFHGGVDSLVDLMNKSFPELGIKKRLQTVELDYYHLLQWSCKLQHNFKRNFAIRWAEGGFLDVRLCETDSRNRNGHNFGKIIRRCRSWDVCVLPLWWYNGDFRISNSIPSSSWNHVNLVHSFMGEARRKAYKLDSECLFHDSLCVPKSKNGVSQLGPFRKNFRESLHTSTYLGKVFWKFVSKSKNQGSRFLKRTKHPTSSPASSLIILNRSISLIKLLVLITIMLGFCALTKTLF

SEQ ID NO: 44 - protein, 550 aa, Cannabis sp.
MMTQGKRWDALFVSKEIIGINLGFYFYPIKIFTKILFTPNTCLCVIIRTLEISFSIKVPIIEIRHSWILGHIRSREIINIPNPVYMLFIIFLLLPSYVPNFIRDSSSMREWNCFNLIHYTTIRVKHKHPNSYIFFIFFQNCDHCGFWNRFLNIVLNRESRLPPTSIKQNFFFKISCVVIYNTTVEDDSINPAQLFAICFFNTQFRKALVHQVDTIHSTMENGGEVTVYCCLILPLIICNIPGYKVSKEFFFIHVSNILPFVNLDKLMYLHVLFNTEYSRHWDSNKSNFPRCNDSKVFSSTTTYSPKQIFPHGFSINFSINIDVRINDIISREAIISHQCSIASSTKVSTRANSRAVPSRKTKILIVLIDPIINFSKGSSGFNPCSLAMNIYFDRMHVSQVYYNKWDLRYVGHALSIMTTASSSNLQANFLGTNSALDMGDIRSGDNKWFWGCVRGKSKILYGRIDRHIKLVVLSVYEFCICYIGGNILEAFKEVFLRISYNLDIEEKEKYYLANIPKTECVLHFSLVIMLAITMNGKLSYLLYRLEWGRN

SEQ ID NO: 45 - protein, 565 aa, Cannabis sp.
MKYSTFCFWYVCKIYFSFSHSISKFQANPQENFLNCLSQYIPTNVTNAKLVYTQHDQFYMSILNSTVQILDLPLTQPQTLVITTLMSPISRHYYVPRKLACRFKLEAVVMMLRACPTYLKSHLLTETCIRSKMFIAKLHGLNPELPLEKFIIGSMRTMRILVFLLGTALLLAGGHFSGGGYGALMRNYGLAADNIIDAHLVNVDGKVLDRKSMGEDLFWAIRGGGGENFGIIAAWKIRLVAVPSMSTIFSVKKNMEIHELVKLVNKWQNIAYMYEKELLLFTHFITRNITDNQGKNKTTIHSYFSSIFHGGVDSLVDLMNKSFPELGIKKTDCKQLSWIDTIIFYSGVVNYNTTNFKKEILLDRSGGRKAAFSIKLDYVKKPIPETAMVTILEKLYEEDVGVGMFVFYPYGGIMDEISESAIPFPHRAGIMYEIWYIASWEKQEDNEKHINWIRNVYNFTTPYVSQNPRMAYLNYRDLDLGKTNFESPNNYTQARIWGEKYFGKNFNRLVKVKTKVDPDNFFRNEQSIPPLPLRHHLSIDLFLLSNYSLYINNVGFLCLNNSILM

SEQ ID NO: 46 - protein, 572 aa, Cannabis sp.
MKYSTFCFWYVCKIIFFFLSFNIQISIANPQENFLKCLSQYIPTNVTNAKLVYTQHDQFYMSILNSTIQNLRFTSDTTPKPLVIITPLNVSHIQGTILCSKKVGLQIRTRSGGHDAEGMSYISQVPFVIVDLRNMHSVKIDVHSQNAWVEAGATLGEVYYWINENNENLSFPAGYCPTVGAGGHFSGGGYGALMRNYGLAADNIIDAHLVNVDGKVLDRKSMGEDLFWAIRGGGGENFGIIAAWKIRLVAVPSMSTIFSVKKNMEIHELVKLVNKWQNIAYMYEKELLLFTHFITRNITDNQGKNKTTIHSYFSSIFHGGVDSLVDLMNKSFPELGIKKRDCKQLSWIDTIIFYSGLVNYNTTNFKKEILLDRSGGRKAAFSIKLDYVKKPIPETAMVTILEKLYEEDVGVGMFVFYPYGGIMDEISESAIPFPHRAGIMYEIWYIASWEKQEDNEKHINWIRNVYNFTTPYVSQNPRMAYLNYRDLDLGKTNFESPNNYTQARIWGEKYFGKNFNRLVKVKTKVDPDNFFRNEQSIPPLPLRHHLSIDLFLLSNYSLHKCWVFVPLKLYFN

SEQ ID NO: 47 - protein, 570 aa, Cannabis sp.
MKYSTFCFWYVCKIIFFFLSFNIQISIANPQENFLKCLSQYIPTNVTNAKLVYTQHDQFYMSILNSTIQNLRFTSDTTPKPLVIITPLNVSHIQGTILCSKKFGLQIRTRSGGHDAEGMSYISQVPFVIVDLRNMHSVKIDVHSQNAWVEAGATLGEVYYWINENNENLSFPAGYCPTVGACGHFSGGGYGALMRNYGLAADNIIDAHLVNVDGKVLDRKSMGEDLFWAIRGGGGENFGIIAAWKIRLVAVPSMSTIFSVKKNMEIHELVKLVNKWQNIAYMYEKELLLFTHFITRNITDNQGKNKTTIHSYFSSIFHGGVDSLVDLMNKSFPELGIKKRDCKQLSWIDTIIFYSGLVNYNTTNFKKEILLDRSGGRKAAFSIKLDYVKKPIPETAMVTILEKLYEEDVGVGMFVFYPYGGIMDEISESAIPFLIELESCMKFGTLHGRSKKIMKSITGFGMFIISRLLMCPKIQEWRISIIGTLIEKLISRVLIITHKHVFGVKSILVKILIGKKPRLIPIISLETNKASHLFPCVIINYLKIYFSYQIISPYNINNVGFLCLNNSILM

SEQ ID NO: 48 - protein, 570 aa, Cannabis sp.; identical to SEQ ID NO: 47

SEQ ID NO: 49 - protein, 575 aa, Cannabis sp.
MKCSTFSFWFVCKIIFFFFSFNIQTSIANPRENFLKCFSQYIPNNATNLKLVYTQNNPLYMSVLNSTIHNLRFTSDTTPKPLVIVTPSHVSHIQGTILCSKKVGLQIRTRSGGHDSEGMSYISQVPFVIVDLRNMRSIKIDVHSQTAWVEAGATLGEVYYWVNEKNENLSLAAGYCPTVCAGGHFGGGGYGPLMRNYGLAADNIIDAHLVNVHGKVLDRKSMGEDLFWALRGGGAESFGIIVAWKIRLVAVPKSTMFSVKKIMEIHELVKLVNKWQNIAYKYDKDLLLMTHFITRNITDNQGKNKTAIHTYFSSVFLGGVDSLVDLMNKSFPELGIKKTDCRQLSWIDTIIFYSGVVNYDTDNFNKEILLDRSAGQNGAFKIKLDYVKKPIPESVFVQILEKLYEEDIGAGMYALYPYGGIMDEISESAIPFPHRAGILYELWYICSWEKQEDNEKHLNWIRNIYNFMTPYVSKNPRLAYLNYRDLDIGINDPKNPNNYTQARIWGEKYFGKNFDRLVKVKTLVDPNNFFRNEQSIPPLPRHRHSIDLFLLLISPYNIHILIIYIKIVCPDVLCM

SEQ ID NO: 50 - protein, 132 aa, Cannabis sp.
TALSLNLQANFLGANSALDMGDMRSDDNKWFWGCVKGESKIVYCRIDRHIQLVVLRVSFRLVTSVGIYCEKHLRKFSQGLAIEVILNERKKNIILQTNQNENVEYFIFLFYFITMNLELSYLLYILEQGQIN

SEQ ID NO: 51 - protein, 461 aa, Cannabis sp.
LMTMRWKRWDALFISKKIIGINQGFHFYYPVKIFTKILLTPNTCLCVIIWTLGIIYSSIKVSIIEICQSWILGHIRSNEAINISNPVMLFRYLRASPSYICTIIHTFQLNEVMELLILKSHPLYHRKGTTHTSQLLHLLHIIFPKFQTQILELVSRSLTSLKNRSAQLIYQAKFPYNYQCRNLQHRYKRYQSSSIVCNLFFYPTQENSYSSSRLDYPLHQGKLKRSKCVLLSYSSHDYLYSLSESVINLCHTCKQYFAICLTQAHVSPSFHTTLLGQQPVFSMLQFRSFLLHHHVPKRDLPPIFDLALLHQRLSVHQRYYQPRGHNFASMVHILLHQSVQLRQGNTQQPNDSHFSHPNNKLLQGLRLQPLRFGYEHLCLNACFSSLLQMGLEICRTCLQNHDHRFEFEFANQFSWTNSALDMRDMRSESKIVYCRILDRHIQLVVLGVSFRFVTLVGIYCE

SEQ ID NO: 52 - protein, 547 aa, Cannabis sp.
MKYSTFSFWFVCKIIFFFLSFNIQTSIANPRENFLKCFSQYIPTNVTNLKLTPKTTNCICLSKIRQYTILDSPLTQPQNYLLSSLLHMSLISKALFYVQENWFANSNSKRWSFRHVLHISSPICYSRLEKHAFNQHRCSPNRKGSRSYPWRSLLLGEKESFGCWVLPYCRSWTLWWRRIWTIDAKLWPRGYRCTLSQRCKSARSKIYGEDLFWAIRGGGGESFGIIVAWKIRLVAVPTKSTMFSVKKIMEIHELVKVNKWQNIAYKYDKDLLLMTHFITRNITNNHGKNKTTIHTYFSSVFLGGVDSLVDLMNKSFPELGIKKTDCKQLSIDIIIFYSGVVNYGTDNFNKEILLDRSAGQNGSLKIKLDYVKKPIPESAFVKILEKLYEEDEGAGMYALYPYGGIMDEISESAIPFPHAGIMYELWYICSWEKHEDNEKASKLDSKCLLHYSLCVLKSKIGISQLRPYWNKSQESKLHTRKYLGEVFWKFQGSKSENPGSQFFKTKHPTSSTASSLMILNRSFSLINSLYAYIDFMIKIFCPGVLCM

SEQ ID NO: 53 - protein, 294 aa, Cannabis sp.
MKYTFSFWFVCKIIFFFSHSISKLQLLILEKTSLNASRNIFPPMQINLHSKQPIVYACPKFDNTQSIHLHNPKTICYRHSFTCLPYPRHYSMLENWFANSNSKRWSFRHVLHISSPICYSRLEKHAFNQNRCSPNYMGSRSYPWRSLLGEKESFGCWVLPYCLRSWTLWWRRLWTIDVKLWPCGYRCTLSQHWKSARSKNIWEKISFGLYVVVEEKASESLHGKLDWLLSQQSLLCLVLKRSRRYMSLSLTSGKTFLTSMTKIYYLSPLSFGNQLFMLIRKLFIAIIIYHCYLW

SEQ ID NO: 54 - protein, 537 aa, Cannabis sp.
MKYSTFSFWFVCKIIFFFLSFNIQTSIANPRENFLKCFSQYIPTNVTNLKLTPKTTLYMPVQNSTIHNLRFTSNTTPKLLVIVTLHMSLISKALFYVQENWFANSNSKRWSFRHVLHISSPICYSRLEKHAFNQKMFIAKSQGLKPELPLEKFIIGLMRKMRSFGCWYCPTVSAAGHFGGGGYDHCENYGLAADNIVDAHLVNVDGKVLDRKSMGQDLFWAIRGGGEKASNHCSMENTGCCPNKVYYVCKDHGDTACEVSQMAKYFLQVQDLLLMTHFITRNITIIMGRIRQQYTLTSLFSLVEWIVSTYEEFSVWYKNRLQTIELIDISSSIAVLITALIILIKFRLLDQLGRTVLSRLSTMLRNQFQNLHLSKFWKNYMKKIRSWDVCVVPLRLSNGDFRISNSIPSSSWNHVIMVHMLGEARRRKVSKLDSKCLHDSLCVLKSKIDISQLTSYRNKSQESNNYTEACIWGEKSLVKILTGKKPWLISIIFKTKHPTSSTASSLMILNRSFSLINSLYTYIDYIYKNSLFVCTVY

SEQ ID NO: 55 - protein, 540 aa, Cannabis sp.
MTMRWKRWDALFISKKIIEINQGFHFYPVKIFTKDFSPKIHASVLFLLGSFIPISRCLLRYVNLGFWDTGVMKLSTFRIQFRYFSLSSCFSQLHMYHNSYMIPTRGNGIADSEISSIRQPGYNAYIPTPLSSSYNFSKILTNADSGIGFLTSNLILKAPFCPADLTSEIWLLKLSVPFTTPLKMIVSIQLNCLQSIFLIPNSGKLLFIKSTRLSTPPRKTKEKVCIVVLFFPLSVIFLVMKVMSNKSMSYLEIFCHLLTNFTSSCISLIFLTLNIVDFVGTATSLIFHATMILKLSLPPPRIAQKRSCPIDFRSSTFPSTLTKCASTILSSARPFHINGPPPPPKCPAAQIVGQYPAPKLRFSFFSLTQTSPMVAPASTHVVWLTSILIECMFLKSTITNGTDMWDMPSESPPFRVICKPIFLDIECLGYGRHVKERQVVFGLCRIDCVLSNFGQAYTIGCFECKFICYIGGNILREAFKEVFSRISNRLDIEEKEKYYLANKPKGECVLHFSLVLIIFELLIKNYPIYSFIWSRGKINI

SEQ ID NO: 56 - protein, 1564 aa, Cannabis sp.
PSCPFSTIILMELSSICNFSFQTNYHTLLNPHNKNPKSSLLSHQHPKTPIITSSYNNFPSNYCSNKNFHLQNRCSKSLLIAKNSIRVCVGFLLVDIYIYMAISFFLSSIIHKIELSFLFYNEKYCVNITDTANQTEPPESNTKYSVVTKILSFGHTCWKLQRPYTFIGVISCAWVLIIFNMLLILIPNTVICIIIYINIFFLKMFFFFLIIIILYLLQMLGKFGKKVFVTCNLGYPMCVTSDEESGEGHKHHYRHIFKYKSLKYNILFIFFSLFLTLFFFLKKKKTFYYNTFKKYNNYNLIHYIAFVISPKLITEVANIYCNYIKYFIKFIFLNNLYCQKENSNRLHIFIFYFLFLGRCIITIWSLVLNIVNYSLIFSKPIGCTLLLCRQSYRKKKITDLFDHIQEIHSYQEKRDTFQKLEVFRKILNFGKFIILLHEILLKCLFIEQSQNNKTELKQQKTKINRETTVKTHSTHYTVNLHSIFEKKTVFLKKIYPTIKKYKNKFQYEMKLLYNLSENFLYSIMCHEKKTYILYNLLVTIILNTSLLFIIKCHISTIFLFLVINFVVIKIRFFVICVSSVYMCNQLDCNCINFVLLLENSGLFGRELFHNTNLLSWSLMLKAFSSLMVILSVNLCTNIINQITDLDIDRYNYHYIFNFVKLNYLHLINIIFIIRINKPDLPLASGEMSIETAWIMSIIVALTGLILTIKLNCGPLFISLYCVSILVGALYSVPPFRWKQNPNTAFSSYFMVIYFIISNDICTQIIYIEKNITFILSAYFIIYIYIITVYFTMSNMLHKILQHCYVIKSSILVHVYYFLSLTVTFDNFSITNLINFFKRNQFNMRLFIKIYNTVQGLVIVNFTCYYASRAAFGLPFEMRWVLPQINTNKNYTYQYICLNNNKKKKTKENRKINTTIILITIFVLQKYSKTTIDVINLLSLIFIAFLIIFERKKKSSCINILRIYERFCFEINKKGNKRRIMYFCLKNKNHGKEINQILDLKLFQSLILAIKGTFGNTFCFFFSKKNLCFFFFLKNRNVLLYNHCYFLIFNFIFIVEFKSVSEVEVVVRVHDWGGRILGTKVVGVKVDQNTDEKKNHLKNGSDYFFCFIFKFLKVFSIKKSENNFIKDVFKKYFHFSKKIKSLKKCCQFKLMRYIMNDFLFLHWDNSTFVFFFFFLLNDSYQNLMYYNISSCVIVSVLLLLSSPLLNQWDQLYFYVKMFQTLKATPSMLNSYANLNFNLFYLKLSFINILLSFFFLFFFTHTYYLLSYFYIGMAYQPWQPDMVLKTHFFVLELFFPMYLLYLLPLFGHRYFINYTLGTKILSNTHAINYYLYNLILHFNTYSNLIRNLNSYHIIFTIVTPEIILIRFIHSILDFIIISKIIQVFYLLMLIVFSSFLILQAFKSNVMLLSHATLAFWLIFQVCHLNSHKRNEQIYYYNNFFHIFINIFNCLIAYRLESLLQITTRLYTYYYYYYYIIIIIIIIIIIIIIYIKIIFSNLLIIHLFIYIYWLYNAGSRQKILRVHVEAPLCIFSICFHLEPCYYKTHLLSTYYKNLLLLIFSSKSLHSY

SEQ ID NO: 57 - protein, 473 aa, Cannabis sp.
NTIDIVLFIYDINIVFLVLYLNFIFIVHILFSNSYLRPNYSSLEEEPISNNSNKLLLNYEREMVCARAPAYFLFILAFEIVSLEILYIIFEFSENVIINCAFLPILYNEKRYTVILFFYLYYIYKNVLSSVISEVDLILYMKKNYYGWCSRNRTAKKNIIRLEINMKKKISNRIFFAEFPCKLSEKFELIIKIIQIIFLKFFKKIYIKSFLSIMIVFLILFLWILNFYLTNLNFLIYIFSYVHVHSIKFKVYIYIEKFSLFYTRKLFQIFFLQYINSKKMIFLLFTLNFNIIKFISTIMIELYFFINILLPPRDVWHLCSQNHKNDSEFFYRFNNISFQKFKFSNLVSPVQFNKILFYFVFQKNFQKKYYQTILPQQKIKIGLIFLKYIYIFWGICLIELKEIFGYPRQIPIFGLINLKFIIIIIIIIIVIFFSVVVTNIYIWNTLILILKKQILIENHKILYIYMDLDCELI

SEQ ID NO: 58 - protein, 286 aa, Cannabis sp.
NCNIRVCVGRLTHYMLLILIICIITFFLKIFFFLVTLCVLAPERVVIIIHFSKYVIIILNIYGYFLFSLVLLIFSKPIGCTLFNVDNLIEKKKQFFYTIAKHRIIKNTVHTTQYKPYNKKVSINFYWRTVVCLVPIWTSGTILILFDNYTNYKIELWTTLILYNELMNFSITNYNLIVIIYNIHYYYFYCFFSSILQAFKSHATLAFWLFSQKKLIYYYNNFFHIFINILIVLRTDSRVYKYKIIIIIIIIIIIIIIYHTFDYLYILVAGSRQKILRVHVMLNIYM

SEQ ID NO: 59 - protein, 286 aa, Cannabis sp.
NCNIRVCVGRLTHYMLLILIICIITFFLKIFFFPGYPMCVTSSGEGTINYNLIFVICNYNFEYLPIIFFIFSFINFFKTYWMYSLCRQSYRKKKITILLYNRKTQNNKHSTHYTVTLQKSIKYFLLENSGLFGTDLDIGYNFNFVYLHLNTVDHSNLYNELMNFSITNYNLIVIIYNIHYYYFYCFFSSILQAFKSHATLAFWLFSQKKLIYYYNNFFHIFINILIVLRTDSRVYKYKIIYLLLIIIIIIIIIIIIIIYYYLFIYILVAGSRQKILRVHVMLNIYM

SEQ ID NO: 60 - protein, 283 aa, Cannabis sp.
NCNIRVCVGRLTHYMLLILIICIITFFLKIFFSWLPYVCNLRRGYKLSNICLNMLFIFTDNIFYLVFYFFQNLLDVLSLMTILKKKITILLYNRKTQNNKHSTHYTVTLQKSIKYFLLENSGLFGTDLDIGYNFNFVYLHLNTVDHSNLVINEFFYNLQFNIGNYLLKYITLLLFLLMLILFINLITGFQESCNLSILVILTKEINILLFFSHIYKYFNCLIAYRLESLQIQNYIHLLLIIIIIIIIIIIIIIYHTFDYFIYIGCRKQAENSTSSCYAEYLVY

SEQ ID NO: 61 - protein, 353 aa, Cannabis sp.
NRNIRVCVWRLIYYNFIFNNENFILCAKMAFFSQLYLRVPARTFEGGYLSFNFFYSPILYLCLFFCFNLNKYISVQYHFFVFLGALFLKYLIFFYHEHFYKMKNKIICKVIAVHSVDTFRKIPGINPNLRNSYIRALIVYSNISYWFYFIIKKKNMIFVLYGRAVDCLVTIFTLGITFLYFSNILCYTSIIYKNNNFLQKNYKNEGWTTLILDNYSLFLKKKITILSYLFSTNFTKNIKTSSLIALCQWWPLDKTSLLINLITGFQQSCNLSILVMNIINISLYLKKNSKYFNCLIVLYRLEILQIRNTQMTTINCVIILFISTYFTSDYILYWVAGSRQKILRVHVMLNIYM

SEQ ID NO: 62 - protein, 396 aa, Cannabis sp.
NRNIRVCVWRLIYYNFIFNNENFILCAKMAFFSQLYLRVLARTFGGGYNKIFHTHRQNHQQHENSEIGIKNMSPAHVPINKTITYKFGYLSFNFFYSLILYLCLLFCFDLNKYISVQYYFFVFLRALFLKYLIFFYHEHFYKIKKKIICKVIAVHSVDTFTGINPNLNSYIRALIVYPNISYWFYFIIKKKKIYLFYMGEQWIVWLRSSHWVSHFNYILGIFYAIELLFRFIKITIFCNKKTIKMKGGPLFYEIIIKVFFLKKKHRYLVIYSHETNFTKNINTSSLIALCQWWPLDKTSLLINLITGFQQSCNLSILVMNIINISLFIKKNSKYFNCLIVLYRLEILQIRNTQMTTINCVIILFISTYFTSDYILYWVAGSRQKILRVHVMLNIYM

SEQ ID NO: 63 - protein, 379 aa, Cannabis sp.
NRNIRVCVWRLIYNFIFNNENFILCAKMVFFSQLYMRVPARTFGGGCIFFKFIYVFVKLEEELAPSTWVVFVYSYYVFLLIYNFVNIFSNFLYIITNFVFMLVFLFFKVLISVQYHFIVFLRALFLSIYNFSIMSIFIKKIKSYVKYCVGTFLEFLYTSSNCLLTKHKLLVLLYNFFKKKNKYICFIWESSGLFGYDLHIGYHILIIFEYFMLLNFYLDLKQFFVTKKNYKNEGWTTLILDNYSTILKKKHRYLVIYSHKLISKCKNLIINSSMSMVALRLKNQSSHQFNYRLSTVMQSHFGYELNYQYIIIFKKKFIFLFNCTLQTRDFTNTKYSNDYHLCYYPLYWYIIFYILYFILGCRKQAEDFTSSCYAEYLVY

SEQ ID NO: 64 - protein, 487 aa, Cannabis sp.
IDNDVTGLGCFAHNHALNQPKSPFSSFFRIHTTTLCTPNSYRGIFGTFIPPKRLSLRNVFSQHDMKYVVHWQAFLFSLPRYFLSPPSGGTTFHTGSQLCLRMECLILPPDPLYYPDGIIHTFPLILLHTAPPEVRFQILVHLSSLTPDLSSEQPFLSNRAKSSVQNGHNFGDPSTNLRYRSILLLHNPFLYQVRLSSSLSDQRVYPTYRPLIRIPVRGLALPSTPGSPPGLLNKKQIFIKLINHFSRFIKIFYNLISPLAFTYTERSQHTTNQCNFPDNNNSKASPIFTYNLKDNLTNMLSTQLFNINFETINNKINYAIILHQRSITAPNHQPVSAAWQYPRGKLGFTYPEITQANFTIEDQAFMHPSLILLLNKAFFSHLTSKIMLIETSLKNHTTTSSQLGILRELKKTQLWYPAESEEEKREFSVEKKTKCHLTKLISEINTYFSITNGTKGVFLGHSQNTNILSCDFYWKYETKLLMTKQII

SEQ ID NO: 65 - protein, 354 aa, Cannabis sp.
MSRSLLRASLGFLDTYGVMLALFVHSKFSVSESFPFSTHLVRVSSRFPTRGNGVSDSGISSILPPGNNRTAVPNSTYNLFANFSKTSFGISSLTSAFALNENITDCVLLSRTSREELVGNPLNKSMDIQLISVQSFLVKPNSGKLFLTKEEAYQFHQGTPQKRLVMMVYSSQELNSQLVSQTVRNLYICQLLFATDEQSSWLNLARSPSEQWLLSMKMAYQPTSSKKEQFQSWLLHHLLKPKINYLPYIFVNYFSICKYTYIYNIITSKTIFSHQNSIATSTEVSTNTYSVAKPSRKSYRTFLGNIVINFTDGSSSFNPCSFCINVYFHLTKVSHIDYDVRNIGYVEAVGIMSA

SEQ ID NO: 66 - protein, 322 aa, Cannabis sp.
MLALFVHSKFSVSESFPFSTHLVRVSSRFPTRGNGVSDSGISSILPPGNNRTAVPNSTYNLFANFSKTSFGISSLTSAFALNENITDCVLLSRTSREELVGNPLNKSMDIQLISVQSFLVKPNSGKLFLTKGRSLSISPRYTPKKVACNDGLLIIPGVVEFPASILTNSKKSLLNLSAFVCHTIFLVESSSSITVAIVNEDGISTNLIFQERTIPKLAAPPPLKAQNKLPPIYFRSTIFPFAKSIRTSTTLSPPRPYFLIKIPPPPLKCPPTPTVQSPAGNPSTGLFLAILTSPMVAPASTHAVFVSTFTFTLRRFLISITM

SEQ ID NO: 67 - protein, 464 aa, Cannabis sp.
INFSLHMNPLEIVFPEILSTPNTCLCVTRGSLVVIFTQVKISIVYICTSWAFGHIRSHVLVNTSRPIDTPIIIIIISWFLNPLSIVENFVEVSGSMGEWNLFRNLIHFPTIRKQLKESHSNIFFILFKHCFQYIFWYSFLHVVKFTFEKQPLLSSIKQVFHLSSNRESSKIRNRLNPAHFIAIFSFQTKLRKTLFHKKIIHSTKKQQELSLEYNLIILGRIHSREPNDNQIIIQLISNVLPLVHKLHGLILAQIPINNECCHCWDRNQSDFPSENDSKACCSTTTYGPKQILPHFSIKNFPININNVSINDIISCAIFSHQRSIATSTKVSTNAYRRAKSSRKAEISTFLGNPIINFTNGSSGFNPSSFFIHVYVDRTVSQVYYDKWDFRNVREAFEIMATASCSDLPMYLAVDRGLDMGGVRCNDNEWFWSREGKSVLYVGAHYRDKRRVVSSVCEFSQSGCV

SEQ ID NO: 68 - protein, 398 aa, Cannabis sp.
MNPLEIVFPKILSTPNTCLCVTRGSLVVIFTQVKISIVYICTSWAFGHIRSHVVINTSRPIDTPIIISWFLNPLSIVENFVEVSGSMGEWNLFRNLIHFPTIRKQLKESHSNIFFILFKHCFQYILWYSFLHVVKFTFEKNHCVLLSKFSISAPIGNPAKETDSIQLISLQSSLFKPNSGKLFSINERRLSTPPRNNDKNAWSITLLFWVEFTVENLIKITNHHPTYQQCIATCSQASWSHFGPNPYQMLSLLMGQEPIFSKRERFQSLLLHHVWPKTNPPHFSIKNFSININYISINDIISCAIFSHQRTIATSTKVSTNAYCRAKSSRKAEISTFLGNPIINFTNGSSGFNPSSFFIHVYVDRTVSQVYYNEWDFRNVRETFEIMATASCSDLPMY

SEQ ID NO: 69 - protein, 453 aa, Cannabis sp.
LQNHSLSLHLQTPPMSKPLSTAQRYMGRSEHEAVAMISKVSLTFLKSHSLTETVLSTTWMKKLLGLKPELPLVKFIIGLPRKVEISAFLLDFALQALVDTLVEVAMVLWCENMAQLIISLMLILMLMEKFLIENQWGRICFGPYVVVEQQALESFSLGKSDWFLSHQQQHSLLIGIWAKMRPSLTSGNTLLISWMMIWLSLGSRLILPKIIRLYSKLNSCHCFLVEWIIFFHWKRVFLSLVKEKIAMKAGLSLFLILLDSLLELRWKTCLIELNNGYFHSKVNLTTRKLYQRMYKQCLKSYMKKMLEWDSFSCFLMVGKMRFLNQRFHSPIEPETSTKFSTMLNGFKNQEMMMGVSIGLEVFITTLLMCPKAQEVHMTIEILTWVKITTRDPRVTHKQVFGVESILGKTISRGFMRLKLIPKISSGMNRAFHLFHCHCQVNKNNGVPLIFTKL

SEQ ID NO: 70 - protein, 453 aa, Cannabis sp.; identical to SEQ ID NO: 69

SEQ ID NO: 71 - protein, 389 aa, Cannabis sp.
MNPLEIVFPKILSTPNTCLCVTRGSLVVIFTQSRSLFTYALLGLLDTGVMLTLLGQLILPSSSPGFTHARILRFPALWENGISDSEISFIFPPGNNKNPTPNIFFILFKHCFQYILWYSFLHVVKFTFEKPLLSSIKQVFHLSSNRESSKIRNRLNPAHFIAIFSFQTKLRKTLFHKKIIHSTKKQQELSLEYNLIILGRIHSREPNDNQIIIQLISNVLPLVHKLHGLILAQIPINNECCHCWDRNQSDFPSENDSKACCSTTTYGPKQILPIDSRSRIFSININYISINDIISCAIFSHQRTIATSTKVSTNAYCRAKSSRKAEISTFSRQSYNKLHQWLRLQPKQFFHPRLRNLGFSSLLRMGLQKRKRDLRIMATASCSDLPMYL

SEQ ID NO: 72 - protein, 454 aa, Cannabis sp.
MNPLEIVFPKILSTPNTCLCVTRGSLVVIFTQVKISIVYICTSWAFGHIRSHVVINTSRPIDTPIIISWFLNPLSIVENFVEVSGSMGEWNLFRNLIHFPTIRKQLKESHSNIFFILFKHCFQYILWYSFLHVVKFTFEKPLLSSIKQVFHLSSNRESSKIRNRLNPTHFIAIFSFQTKLRKTLFHKKIIHSTKKQQELGLEYNLIILSRIHSREPNDNQIIIQLVSNVLPLVHKLHGLILAQIPINNECCHCWDRNQSDFPSENDSKACCSTTTYGPKQILPHFSIKNFPININNVSINDIISCAIFSHQRSIATSTKVSTNAYRRAKSSRKAEISTFLGNPIINFTNGSSGFNPSSFFIHVYVDRTVSQVYYDKWDFRNVREAFEIMATASCSDLPMYLAVDRGLDMGGVRCNDNEWFWSREGKSVLYVGAHYRDKRRVVSSVCEFSQSGCV

SEQ ID NO: 73 - protein, 568 aa, Cannabis sp.
MKYSTFSFWFLCKILVSLLSFSIQTSRANPHEKFLQCFSKHINNNNNTSIVKLIHTPNDPSYISVLNSTIQNLRFASPSTPKPLVIITPSNTSHVQACVLCSKKYGLQIRTRSGGHDFEGASYVSKVPFVILDMRNLRSITVDVDTKTAWVEAGATIGELYYRIAEKNGNLSFPAGYCRTVGVGGHFSGGGYGALLRKYGLAADNIIDVHLVNADGEFVDRKSMGEDLFWAIRGGGGASFGIILAWKIRLVAVPSKVTMFSVSKNLEMNETVKIYNKWQNIAYKFDKDLLLFVSFMTINSTDSQGKYKTTIQASFSSIFLGRVESLLTLMQKRFPELGIERKDCLEKSWIETVVYFDGFSSGDTPESLLNTTFQQNVFFKVKLDYVKKPVPEFVMVKLLEKLYEEDVGVGFLMMYPYGGKMDEISESAIPFPHRAGFMYKILYLSAWEKEGESEKHMNWVRSAYNFMSPYVSQNPRATYLNYRDLDLGTNNEKGPISYSQASVWGKKYFGMNFKRLVNVKTKVDPSNFFKNEQSIPPLLSRRLIFVLIYNNEKFYNSPFKGCMYLIYF

SEQ ID NO: 74 - protein, 392 aa, Cannabis sp.
VLPSQLLELASSHSLISPKIHFVEMLYVKILVYPHLKNHQSKRQFQSSSFRGNLFFQFPTQEISFASIGDSQPYQEIKRMKLVLSCISLVNRNSSQRVTNLCQTCKQYFAICYISSQSHSSPSFYQRTLMELQPIFSKREFQSLLHHHHVWPKTNLLPIFGQGILHLRLSEHQYYQLQGHIFATVLHSLLHNAHLPQQYDSTQQENSDSHFSQQSYNKVHQWLQLQPMQFWYLRLQLNVDFSYLISQMGLTHRRHPQSHGHRFEFESASHISWSIKHRLGHGMYLKVLVVLVLMEKRIGFVLNLGQRYMMDHLECVLLQLIYCYCCYVWRSIEESCHVDLEKFGRMREVKLIFCKETKKRMLSTSFFLQLTVTFLIYSIICGKGKQNINKWV

SEQ ID NO: 75 - protein, 2113 aa, Cannabis sp.
SGGMLCSFLKKLLGSTLVFTLTNLLKFIPKYFLPQTLLVSTNRTLLVICSQIKVPIIEICSSWILGHIRRHEIICTSDPIHMLFTFSFFLPCRQVQNFVHKSSSMREWNCFNLIHFTTIRVHHKKPHSYIFFILLQKFYHHNFWNWLLYIVFHLEKYILLKCCIKRFWCIPTKTIEVNDSFNPALFEAIFSFNSQLRKFLLHQCEETLNPTKKKRMKLVLSCISLVNRNSSQRVTNLCQTCKQYFAICYISSQSHSSLSFYQRTLLMELQPIFSKREFQSLLHHHHVWPKTNLLPIFGQRILHLRLSEHQYLMKSATHFYTFLLKILVLTTKLRNRKLELPRNYICKLRNLENSRISKVKLFKIRKIKVVVSSLAPYKYQAWVEELVQNNQHQKNQSSKLSIKVYYFLKQPSLLSQTTFILNLQLLINITTSLHYHNKPLTTIHLFQITNTNLLSNHQWYQSSVRSYITGRNLFHSSTVRSTIALHYLFQFSMEKIFLVHQNEDLFSITKSMENCRRNHYSGRYYISFGRSKEGTRGSTKGFSCIICLQQAMATIFFHEYERSNAKEAWDTLQEEFQGTVKVRTVRLQKLRRDFENLRMKDNETAKDYYSRIKEIVNQMGAYGEIISDKNIVQKILISCTEKYDSIVSVIEETKDLETLSPTELMGSLEAYESRRERHKESEVENAFQSKINSRSQKPKADGKKTQEKQKENNDKYPPCGICKRKSHLEKDCWFKGKPQCQNCKKFGHTEKTCRLKKSHQANFSEEKNDENNLFYVCQAATEKKRYLVSQWLQPHDEKKHLLSIQDSQNRWLHGSSRQRHHCHHKRQEIHQCTLVPNIDQNLLSVGQMIEKGYSLHFEGDSCTIYDKQDKSFQIAKVKMKENRCFPIQWRYASNVAMQAQTDESWLWHRRFGHFNFHGLKILKQKNMMRDLPAIKEINTVCEGCMLGKQHRQPFPSGKAWRAKKPLELVHTDVCGAMRTPSNDQNRYFILFIDDFTRMTWVYFMQQKSQVFDIFKKFKSRVERQSGHYIKTIRSDRGKEYTSNEFNKFCEDEGMEHQLTVGYAPEQNGVSERKNRTVMEAARAMLLEKGLPKRFWAEAVSTAVYLLNRCPTKAVQNKTPIEAWSGRKPSAKHLKVFGCICYSHIPKEKRGKLDEKAEKGIFLGYSTQSKGYRVYSLETNKLIISRDVKFDEDAAYNWETQEVERKTVNIPLPPRQETDQNEVLTQPRTQEPAQVIESPPDSPVRRTRPLSEIYETCNLVLMEPESFEAAHKQEVWRKAMNEEIKMIMKNETWELVDRPQDKDTIGVKWVYKTKLNADGSIQKHKARLVAKGYSQQYGVDYNETFAPVARLDTIRALIALAAQRNGRFFNSMSQHSMVILKKKFMWSNLKGSWYKDRKIKSSNKRLYMASKLHEPGIAELTTTLPSKDSGGARVSQLFTSKLKVRMIHLSLYTLMISSTQAIMRRRSLKKTKILRPTWDCTTFSGSKLKKKMGSSSHKRSIQRHYRNSKWRDARLYQLHTITKLSRRKMAHRKLMNQNFEVLAAFYILLQDQTCTQLVSYQDSCMIQVKFTTEQPSESSDTCKEQNSMEYGTELQVTQNLLATQIVTGQDPWTTRARQDMPSHLDQEYFHGHQRSKQLLHNHQLKQSILQQQLQAKLYGSKEYLKTCENYKRSYKDILRQISYSNGEKSSISNTYKHQVPFHQGSRSKKEIELKHCKTEEQVADIFTKALPRGKFELLRDMIGVTEMCTKEEKVLHISTLFFSRKFYLHKTKKIRENNYLETIFVSETKILEYLRKLNCNLKEKSRKLYHPLPINTKLGLRSCNKNQHQKTKVPNYQKFTTFSNNPLFAKLLLYTKSTTTHQHHYFTTLPQQTINHISTYSKSKPIQIYYQTINIISCKAIFSQQCSIASSTEMPTYPNSTTVSSRKTQIPIFLSNPIIKFTNGSSSFNPCSFGIYVYSDTISHIYHKWDFRHIGGTLKVMAAASSSNLQAIFLGANTGLDMGCIRCDDNWFWCRRSESKVLYSIDRDIWIIWSVYEFYNCIVIVVDMFGEALKKVFMWISLRSLDREEKNYFAKKPKRECVLHFSCNHEFRPFLYIALIVEKVYKTKFINGGR

SEQ ID NO: 76 - protein, 468 aa, Cannabis sp.
GGMLCSFLKKLVGSTLVFTTNSNFYSTFSPKCLLVHNLDLFHYLFPNLGLYNYMKLLDFWTRMESCNYKHFEPNSYAFHFLLLFPTETNIKFCTLQLDVGMELQIQESRSFYHHKGTFEYMPILHLLHITFPKVPQFLKLASRSLVSPNNPLLHLLDRAKPPIYLHLRIHRKRSFQSNSFQNNLFLLHPTQESFASRKGNYPLYQEKKRMLVLLSYSSHAHQNSQLRTLPLTNLGQTCEQYFATYYKFSQFHLSASSYLIIQPMAQEPIFSKQEQFQSLLHHHHEWPKTNLLPLIFGQRILHQRLSEHQHYQLQGHIFASMLHSLLHNAHQPQHYGNSHQENDSHFSQRSYNKVLQGLQIQPMQFCYLRLQLNVDFSYLISQMGLTHRRHPQSHGRRFEFESVSHISWNIKHRLGHGMYLKVLVVLVLEKIGSVWLNLEGRMKSHWSVYEFGKCIVVGDMLEKHRKLL

SEQ ID NO: 77 - protein, 2140 aa, Cannabis sp.
MSKPVFYVPRNMAYRFELEAAAMTLRVSPMCLKSHLYIEIYVQSCGSQLQLNLLFILLLSLATVSVSFLLGLLLIRLFCFGLVSDLLSLALYIRLDCNSVQDSFFSILSFLSSLFFLFHKSLFCIFFHLVLFCSAMNPRFNMVSERWPPLNVNMATLGSTGGGNSNNTSGFNGGQAAQPRIPTHQETVYFNHSISIRLNDHNFLLWKQQVLAAIKGNRLLKFIKDPPPAEFQTPEDRVQNRVNQAFIDWEIQDQLLVSWLLSSMTESLLTRMVGCDSAQQIWSTLEKHFTLQVSSKILEFRTKLQNLKKGNLSLNDYLLKVKQSVDLLASVGEVLSDRDHVAAIFKGLPSEYDTFVISTNTRTEQYTVGEIEALLLASESRIEKSGKEFDVSANLVTGDQDQQLDTLMEANLAWRRFRQQYGRGNSQVYNNSGQFNQPVFRSFNRGDSSGVKGNFSNFPPYQANRTGTNLNNKVQCQLCLRFGHTAHDCFYRFDKSFSGTKPGASNQVTVPQKPQANLTTNNSSTDSSWYPDSGATNHCTPQAQNLAVCYDYEGTDQMHVGDGTGLSIKHIGHSFFTPQHASHSLVLNNLLHVPEITKNLMSVSKFAKDNNVYFEFHDDFCCVKDKVSNITLLMGIHKNGLYTFDKSQLGPIHSAPTSRIKFQDLQQPSHSQTSSPPIHESTLSQPNSKCTFVATLNNSSVTVSNCYKCNTNVQNNFTLWHNRLGHPSEKVVQTVLKSCNISNVNKDSEFSICSACCLGKIHKFPFPKASQTVISEPLQLVVSDLWGPSFVPSFNGYKYYIHFVDAYSRFTWLYLLKNKSDALKTFQHFKAEAELQLGKSIKTLQTDWGGEYRSFTSFLADCGIHHRHPCPTTHQQNGLAERKHRHIVENGLALLAQASLPLKFWDEAFRTAVYLYNRLPTPLLHQCSPLETLFHTKPDYTTFRTFGCKCYPNIRPYNKHKLEFRSTPCTFLGYSLNHKGYKCLDSKGRLYISRDVIFDEFSFPYDQIHNQQNHTPDPIIPSHVSAVIPVCCHFKTPFSATDLVAPAETDTASASVSLAPSDAAVELNNVPTPTHNDQHALFDTAIPSNLFVGQFPTNSRCADQCPSADTGGFSGLSPCSSNAGSDSVTHTDQPSSTSPRVPIIPDSRTAPVYSSPAALPLVAGCVNAPGKHNMHRMQTRSKMGVFKPKVYLASREPTSLKEALQQEQWNNAMSDEILALARNRTWVLVRLPEGRQAIGCKWVYKIKENPDGSVLKNKARLVAKGFHQQAGFDFTETFSPVVKPVTIRVVLTLALSNGWKIRQLDVNNAFLNGDLQEEVYMTQPPGFEIPGQEQLVCKLNKAIYGLKQAPRAWFDKLQQSLTSFGFTPSKSDHSLFINHSPTSTTLVLVYVDDILITGSDQTVVNTLVADLNTRFSLKDLGKLRYFLGIEVEHTDSGLHLCQKKYAQDLLVRAQMFGSKSSPTPMTSGLRLSAHEGEPLADVQQYRSIVGALQYLTITRPELSFSVNKVCQFMQKPLSTHWQAVKRILRYISGTMHYGLTFSKPESHDLVAFCDADWASDPDDRKSTSGYAIFFGSNLIAWKSKKQQTISRSSTEGEYRSVANVTAELTWLHYLFSELHIHMPQPPTIWCDNLSTIMLTQNPVLHARTKHIELDLYFVREKVLNKMVQIKHVAALDQIADGLTKAISSQRFSGFRDKLRITDHPILSLRGGVKAHDSYDSTFDCSFCYVSLLVLVFCYEGCYSFGYSVLASQICALCIGWIVILFNEINLSSPFFPFFLLCSFSFINLCSAFSFILFYDSVLQILDLTNHYRRRQNCMGIWSYPWRTLLDREKESFSWWLLPCWGWWAFQWRRLRSIDAKIWPCSCHCSLSQRWRIRPKIYGRRFVLGHSWWWWSKLWNCSCLENIGSCAIGYCIISELADKNCENLVAKYCSQVPRFVNGSVLNCEFYAWEEYDNNTSYILFYFSWSGVSFLDANLSVGCSKRLFNELDNDLFLQILKRIGGFARSNKCSKGLFGETRLREANFRNRYGQTFGKVIRRCRIGIYSNVPLWWNERDSICNSIPTSSWSYVQNFILVSVGKRRRKKAYELGSKCLLHDSIRVQKSKSFIYLRPRFGNKKRSYKLTSKHLGEKVLQKFEISS

SEQ ID NO: 78 - protein, 393 aa, Cannabis sp.
MSKPVFYVPRNMAYRFELEAAAMTLRVSPMCLKSHLYIEIYVQSLTITKLHGLNLELPWENFIIGLLRKMRILVFLVAIAIVLGLVGISVEEATEHCENMALQLIMSLMLTSTLMENSLTENLWEKICFGPFVVVVEQALELFSLGKLDWFLCHRRLLYYQLVRTCRMKLKFIISGKILLTSLTKICWLGSLILLMSMGRIQQYKLHSFLFFLVEWISFFPCKLTFLSWVVKIVLKRVGLKSFTSMNSQVKINWRFCSIQQMRVILRGNTTLGSQFQKLLWSNFWKSYMKKMDWHIFKCTLMVVKARFLNLQFHSHIELELCTKFIYWSQWEKEEESERHMNWVRSVYNYMTPYVSKNPRASYINYRDLDLGTNNEKGPISYEQASIWGKKYF

SEQ ID NO: 79 - protein, 235 aa, Cannabis sp.
NLGQTCEQYFATYYKFSQFHLSASSYLIIPSMAQEPIFSKREQFQSLLHHHHEWPKTNLLPIFGQRIFHQRLSEHQHYQLQGHIFASMLRSLLHNAHQPQHYGNSHQENDSHFSQQSYNKVLPRLQIQPMQFCYLRLLNVDFSYLISQMGLTHRRHPQSHGRRFEFESVSHISWNIKHRLGHGMYLKVLVVLVLEKIGSVWLNLEGRMKSHLECVVWQVMYCCWRYVWRSIEESC

SEQ ID NO: 80 - protein, 405 aa, Cannabis sp.
LDFRTRMESCNYKHFEPNSYAFHFLLLFPTETNIKFCTLQLYVGMELQIQESRSFYHHKVHLNICQSYIFFILFQKFDHNNFNWLPNVVFPLKPFTTFVGSSKTSNLSHLRIHSKRSFQSNSFQNNLYLLHPTQESFASRKETYPLYQEKKRMLVLLSYSSHAHQNSQLRTLPSTNLGQTCEQYFATYYKFSQFHLSASSYLIIQPMAQEPIFSKQNNSKACSTTTTNGPKQIFSHRFSVNEFPSALTKASMTLSAARPYFRINAPPPPLKCPPTPTLWQPPGKLRFSFFSAILSSPRVAPDSTHAVLLSTSTVIERRFLISNITNGTLDTETPSKSWPPLRVRICKPYFLEHKTQAWTWDVFEGVMITSGFGVVKIGSVWLNLEGRYMKVIWSVYEFGKCIVVG

SEQ ID NO: 81 - protein, 455 aa, Cannabis sp.
HLQIHPMSKRVFYVPRNMAYRFELEAAAMTLRVSPLCLKSHLYIEIYVQSLTITKLHGLNLELPLENFIIGLLRKMRILVFLVAIAIVLGLVGISVEEAMERCENMALQLIMSLMLTSTLMENSLTENLWEKICFGPFVVVVEQALELFSLGKLDWFLCHLRLLYYQLVRTCRMKLLKYIISGKILLTSLTKICWLGSLILLMSMGRIQQYKLHSFLFFLVEWISFFPCKLTFLSWVEKIVLKRVGLKSFSSMNSQVKINWRFCSIQQMRVISRGNTTLGSQFQKLLWSNFWKSYMKKMDWHIFKCTLMVVKARFLNLQFHSHIELELCTKFYIGLSGKKKKKVKGIIGFEVFIITLHTCPKIQELHILIIETIWEQIMKKVLVMNKQAFGGKSTSIKILRNFKKPRLTRLISLGTNRAFHLYLHDFSKYIYICYNLLLINVVLYCNIYTYGLFL

SEQ ID NO: 82 - protein, 555 aa, Cannabis sp.
MMTRWKRWDTLFVSKKIIGISFGFHLNPVKIFTKILFTPNTCLCVIIRTLRISFSIKVPIIEIRQSWILGHIRSCEIINTSNPVYMLFVIFLLLPGSSVPKFIHYSSSMREWNCFNLIHYTTVRVQHIHPNSYLFFIFFQNFDHCSFRYFLNIVLNESRLLPSSIKQNFLFKISSVVIYNTTVEDGCINPAQFFAISFFNTQLRKALVHQVNTIHSTKKNGREVTMYCSLILPMIICNIPSSEVSREHIFVILVSNILPFVKLDKPMYLHVLFNTEYSSLWDNNKFDFPCCNDSKVFSSSTTYSPKIFSHGFSINFSINIDVCINDIISRKAIISHQCSIASSTKVSTYANSRAIPTRKTKILIHLIDPIINFSKGSSGFNPRSLAMNIYFDRMHVSQVYYSKWDLRYVGQTLSIMATASSSNLQTNFLGAENTGLDMGDIRSDNNEWFWGCIRGESKILYCRIQDRHIQLVVLSVYEFWICWIVRNIFREAFKEVFLRISYNLDIEEKEKYYFAKNQKENVEQFIFLQSYFELLIENYPIYNIIYWSWGKIDIN

SEQ ID NO: 83 - protein, 549 aa, Cannabis sp.
MNCSTFSFWFFAKYFSFSHSISKFQLILKKTSLNASRNIFLTIQQIQNSYTLNTTNCICLSIRQYKILDSPLIQPQNHSLLSLLQMSPISRPVFSAPRKLVCRFELEAVAMMLRVCPTYLKSHLLTETCIRSKIFIAKLRGLKPELPLEKFIIGSMRMRILVFLVGIALLLAVDTLVEEAMEHCEIMALRLIISLMHTSMLMEKFIENPWEKIYFGLYVVEEEKTLESLQHGKSNLLLSHQRLLYSVLKRTWRYMGLSSYLTNGKILLTSMTKICSRLTSELGILQIIMGRIRLQYMVTSLPFFLVEWIVLTTRAFLSWVLKKLIAKNAGLIQPSSTVVLITTLLILKRKFCLIDQLGRRRLSQLSTMLRNYLKLQWSKFWKNYMKKRELGCMCCTLTVVWMRFQNQQFHSLIELECMNFGTLLPGRSKKITKSITGFEVFIISQLLMCPKIQDWRISIIGTLIEKLILRVLIITHKHVFGVKSILVKILTGLRKPKLIPIIFLETNKVSHLFHRVIINYLPILCMLPSMKIYITTVTIIRYMNKLSFL

SEQ ID NO: 84 - protein, 547 aa, Cannabis sp.
MMTRWKRWDTLFVSKKIIGISFGFHLNPVKIFTKILFTPNTCLCVIIRTLRISFSIKVPIIEIRQSWILGHIRSCEIINTSNPVYMLFVIFLLLPGSSVPKFIHYSSSMREWNCFNLIHYTTVRVQHIHPNSYLFFIFFQNFDHYSFRYFLNIVLNESRLLPSSIKQNFLFKISSVVIYNTTVEDGCINPAQFFAISFFNTQLRKALVHQVNTIHSTKKNGREVTMYCSLILPMIICNIPSFSESALNLCHTCKQYFAICITQAHVSPCSFHIPLMGQQQVFSMLQFQSFLLLHHVPKIDLLHGFSINFSINIDVCINDIISRKAIISHQCSIASSTKVSTYANSRAIPTRKTKILIHLIDPIINFSKGSSGFNPRSLAMNIYFDRMHVFKSTIANGTDMDKPSASWPPLRVRICKPTFLEQRILAWIWETFEGVTITSGFGVVSEVNLRFCIVEFRTDIYNWSCVYMNFGFAGLLGIYSEKHLRKFSGLAIEIWILNERKKNIILQTNQKENVEQFIFLQSYFELLIENYPIYNIIYWSWGKIDIN

SEQ ID NO: 85 - protein, 555 aa, Cannabis sp.
MMTRWKRWDTLFVSKKIIGISFGFHLNPVKIFTKILFTPNTCLCVIIRTLRISFSIKVPIIEIRQSWILGHIRSCEIINTSNPVYMLFVIFLLLPGSSVPKFIHYSSSMREWNCFNLIHYTTVRVQHIHPNSYLFFIFFQNFDHCSFRYFLNIVLNESRLLPSSIKQNFLFKISSVVIYNTTVEDGCINPAQFFAISFFNTQLRKALVHQVNTIHSTKKNGREVTMYCSLILPMIICNIPSSEVSREHIFVILVSNILPFVKLDKPMYLHVLFNTEYSSLWDNNKFDFPCCNDSKVFSSSTTYSPKIFSHGFSINFSINIDVCINDIISSKAIISHQCSIASSTKVSTYANSRAIPTRKTKILIHLIDPIINFSKGSSGFNPRSLAMNIYFDRMHVSQVYYSKWDLRYVGQTLSIMATASSSNLQTNFLGAENTGLDMGDIRSDNNEWFWGCIRGESKILYCRIQDRHIQLVVLSVYEFWICWIVRNIFREAFKEVFLRISYNLDIEEKEKYYFANKPKGECAIHFSSVLMIFIIMNRELSYLYYILELGQMNHK

SEQ ID NO: 86 - protein, 550 aa, Cannabis sp.
MMTRWKRWDTLFVSKKIIGISFGFHLNPVKILPKYFSPQIRACVLLGLSGLVFPKSRSLLRYANLGFWDTGVVKLTLRTQFICFSLSSCFSQVAVYQSSYIIPARGNGIADSEISSIIPPGYTHTSQLLPLLHIIFPKFPLQFQVLVSHSLTYESRLLPSSIKQNFLFKISSVVIYNTTVEDGCINPAQFFAISFFNTQLRKALVHQVNTIHSTKKNGREVTMYCSLILPMIICNIPSSEVSREHIFVILVSNILPFVKLDKPMYLHVLFNTEYSSLWDNNKFDFHAAMIPKFSPPPPRIAQNRSSPMDFRSRTFPSTLTSVHQYYQQQGHNFASMLHSLLHSVHLRQQAIPTRKTKILIHLIDPIINFSNGSSGLNPRSLAMNIYFDRMHVSQVYYSKWDLRYVGQTLSIMATASSSNLQTNFLGAENTGLDMGDIRSDNNEWFWGCIRGESKILYCRIQDRHIQLVVLSVYEFWICWIVRNIFREAFKEVFLRISYNLDIEEKEKYYFANKPKGECAIHFLQSYFELLIENYPIYNIIYWSWGNELTI

SEQ ID NO: 87 - DNA, 1833 bp, Cannabis sp.
aagaaagacaatttattttattacatatatcttatgatagtctacacagttgtaatgtagattttcatacttgggagcatacatagtatgggtagataattaatgatgacgcggtggaagaggtgggatactttgttcgtttctaaaaaaattattgggatcagctttggttttcaccttaactaacctgttaaaatttttaccaaaatacttttcaccccaaatacgtgcttgtgtgtaattattaggactctcaggattagtttttcctaaatcaaggtccctataattgagatacgccaatcttggattttgggacacataaggagttgtgaaattataaacacttcgaacccagtttatatgcttttcgttatcttgcttctcccaggtagcagtgtaccaaagttcatacattattccagctcgatgagggaatggaattgctgattctgaaatctcatccattataccaccgtaagggtacaacacatacatcccaactcctacctcttcttcatataatttttccaaaattttgaccattgcagtttcaggtattagtttcttaacatagtctaacttaattgagaaagccgtcttcttcccagctgatctatcaagcaaaatttcctttttaaaattagcagtgttgtaatttacaacaccactgtagaagatggttgtatcaatccagctcaattctttgcaatcagtttttttaatacccaactcaggaaagctcttgttcatcaagtcaactagactatccactccaccaagaaaaatggaagagaagtaaccatgtactgtagtcttattcttcccatgattatctgtaatattcctagttctgaagtgagtcgtgagcattaaatctttgtcatacttgtaagcaatattttgccatttgttaaataacttgacaagcccatgtatctccatgttctttttaacactgaatatagtagcctttgatgggacaacaacaagtttgattttccatgctgcaatgattccaaagttttctctcctccaccacgtatagcccaaaatagatcttctcccatggattttcgatctagaacttttccatcaacattgactaagtgtgcatcaatgatattatcagccgcaaggccataatttcgcatcaatgctccatagcctcctccactaaagtgtccacctacgccaacagtagggcaatacccaccaggaaaactaaaattctcattcatctcattgatccaataataaacttctccaagggtagctccggcttcaacccacgcagtttggctatgaatatctactttgaccgtatgcatgtttctcaagtctactatagcaaatgggacttgagatatgtaggacaaaccctcagcatcatggccaccgcttcgagttcgaatctgcaaaccaactttcttggagcagagaatactggcctggatatgggagacatttgaaggagtgacaataacgagtggttttggggttgtatcagaggtgaatctaagattttgtattgtcgaattcaggacagacatatacaattggtcgtgttgagtgtatatgaattttggatttgctggattgttaggaatatattccgagaagcatttaaggaagttttcttgaggattagctattgaaatttggatattgaatgagagaaagaaaaatattattttgcaaacaaaccaaaaggagaatgttgagcaattcatttttcttcagtcctaatgatattttgaattattatgaatagagaactatcctatttataatattatatattggagttggggcaaatgaattgacataaat

SEQ ID NO: 88 - DNA, 1832 bp, Cannabis sp.
aagaaagacaatttattttattacatatatcttatgatagtctacacagttgtaatgtagattttcatacttgggagcatacatagtatgggtagataattaatgatgacgcggtggaagaggtgggatactttgttcgtttctaaaaaaattattgggatcagctttggttttcaccttaactaacctgttaaaatttttaccaaaatacttttcaccccaaatacgtgcttgtgtgtaattattaggactctcaggattagtttttcctaaatcaaggtccctataattgagatacgccaatcttggattttgggacacataaggagttgtgaaattataaacacttcgaacccagtttatatgcttttcgttatcttcttgcttctcccaggtagcagtgtaccaaagttcatacattattccagctcgatgagggaatggaattgctgattctgaaatctcatccattataccaccgtaagggtacaacacatacatcccaactcctacctcttcttcatataatttttccaaaattttgaccattgcagtttaggtattagtttcttaacatagtctaacttaattgagaaagccgtcttcttcccagctgatctatcaagcaaaatttcctttttaaaattagcagtgttgtaatttacaacaccactgtagaagatggttgtatcaatccagctcaattctttgcaatcagtttttttaatacccaactcaggaaagctcttgttcatcaagtcaactagactatccactccaccaagaaaaatggaagagaagtaaccatgtactgtagtcttattcttcccatgattatctgtaatattcctagttctgaagtgagtcgtgagcattaaatctttgtcatacttgtaagcaatattttgccatttgttaaataacttgacaagcccatgtatctccatgttctttttaacactgaatatagtagcctttgatgggacaacaacaagtttgattttccatgctgcaatgattccaaagttttctcccctccaccacgtatagcccaaaatagatcttctcccatggattttcgatctagaacttttccatcaacattgactaagtgtgcatcaatgatattatcagccgcaaggccattttgcatcaatgctccatagcctcctccactaaagtgtccacctacgccaacagtagggcaatacccaccaggaaaactaaaattctcattcatctcattgatccaataataaacttctccaagggtagctccggcttcaacccacgcagtttggctatgaatatctactttgaccgtatgcatgtttctcaagtctactatagcaaatgggacttgagatatgtaggacaaaccctcagcatcatggccaccgcttcgagttcgaatctgcaaaccaactttcttggagcagagaatactggcctggatatgggagacatttgaaggagtgacaataacgagtggttttggggttgtatcagaggtgaatctaagattttgtattgtcgaattcaggacagacatatacaattggtcgtgttgagtgtatatgaattttggatttgctggattgttaggaatatattccgagaagcatttaaggaagttttcttgaggattagctattgaaatttggatattgaatgagagaaagaaaaatattattttgcaaacaaaccaaaaggagaatgttgagcaattcatttttcttcagtcctaatgatattttgaattattatgaatagagaactatcctatttataattatatattggagttggggcaaatgaattgacataaatat

SEQ ID NO: 89 - DNA, 1838 bp, Cannabis sp.
aagaaagacaatttattttattacatatatcttatgatagtctacacagttgtaatgtagattttcatacttgggagcatacatagtatgggtagataattaatgatgacgcggtggaagaggtgggatactttgttcgtttctaaaaaaattattgggatcagctttggttttcaccttaactaacctgttaaaatttttaccaaaatacttttcaccccaaatacgtgcttgtgtgtaattattaggactctcaggattagtttttcctaaatcaaggtccctataattgaggtacgccaatcttggattttgggacacataaggagttgtgaaattataaacacttcgaacccagtttatatgcttttcgttatcttcttgcttctcccaggtagcagtgtaccaaagttcatacattattccagctcgatgagggaatggaattgctgattctgaaatctcatccattataccaccgtaagggtacaacacatacatcccaactcctacctcttcttcatataatttttccaaaattttgaccattgcagtttcaggtattagtttcttaacatagtctaacttaattgagaaagccgtcttcttcccagctgatctatcaagcaaaatttcctttttaaaattagcagtgttgtaatttacaacaccactgtagaagatggttgtatcaatccagctcaattctttgcaatcagtttttttaatacccaactcaggaaagctcttgttcatcaagtcaactagactatccactccaccaagaaaaatggaagagaagtaaccatgtactgtagtcttattcttcccatgattatctgtaatattcctagtttctgaagtgagtcgtgagcattaaatctttgtcatacttgtaagcaatattttgccatttgttaaataacttgacaagcccatgtatctccatgttctttttaacactgaatatagtagcctttgatgggacaacaacaagtttgattttccatgctgcaatgattccaaagttttctcctcctccaccacgtatagcccaaaatagatcttctcccatggattttcgatctagaacttttccatcaacattgactaagtgtgcatcaatgatattatcagccgcaaggccataattttgcatcaatgctccatagcctcctccactaaagtgtccacctacgccaacagtagggcaatacccaccaggaaaactaaaattctcattcatctcattgatccaataataaacttctccaagggtagctccggcttcaacccacgcagtttggctatgaatatctactttgaccgtatgcatgtttctcaagtctgctatagcaaatgggacttgagatatgtaggacaaaccctcagcatcatggccaccgcttcgagtttgaatctgcaaaccaactttcttggagcagagaatactggcctggatatgggagacatttgaaggagtgacaataacgagtggttttggggttgtatcagaggtgaatctaagattttgtattgtcgaattcaggacagacatatacaattggtcgtgttgagtgtatatgaattttggatttgctggattgttaggaatatattccgagaagcatttaaggaagttttcttgaggattagctattgaaatttggatattgaatgagagaaagaaaaatattattttgcaaacaaaccaaaaggagaatgttgagcaattcatttttcttcagtcctaatgatattttgaattattatgaatagagaactatcctatttataatattatatattggagttggggcaaatgaattgacataaat

SEQ ID NO: 90 - DNA, 1837 bp, Cannabis sp.
aagaaagacaatttattttattacatatatcttatgatagtctacacagttgtaatgtagattttcatacttgggagcatacatagtatgggtagataattaatgatgacgcggtggaagaggtgggatactttgttcgtttctaaaaaaattattgggatcagctttggttttcaccttaactaacctgttaaaatttttaccaaaatacttttcaccccaaatacgtgcttgtgtgtaattattaggactctcaggattagtttttcctaaatcaaggtccctataattgagatacgccaatcttggattttgggacacataaggagttgtgaaattataaacacttcgaacccagtttatatgcttttcgttatcttcttgcttctcccaggtagcagtgtaccaaagttcatacattattccagctcgatgagggaatggaattgcttattctgaaatctcatccattataccaccgtaagggtacaacacatacatcccaactcctacctcttcttcatataatttttccaaaattttgaccattgcagtttcaggtattagtttcttaacatagtctaacttaattgagaaagccgtcttcttcccagctgatctatcaagcaaaatttcctttttaaaattagcagtgttgtaatttacaacaccactgtagaagatggttgtatcaatccagctcaattctttgcaatcagtttttttaatacccaactcaggaaagctcttgttcatcaagtcaactagactatccactccaccaagaaaaatggaagagaagtaaccatgtactgtagtcttattcttcccatgattatctgtaatattcctagttctgaagtgagtcgtgagcattaaatctttgtcatacttgtaagcaatattttgccatttgttaaataacttgacaagcccatgtatctccatgttctttttaacactgaatatagtagcctttgatgggacaacaacaagtttgattttccatgctgcaatgattccaaagttttctcctcctccaccacgtatagcccaaaatagatcttctcccatggattttcgatctagaacttttccatcaacattgactaagtgtgcatcaatgatattatcagccgcaaggccataattttgcatcaatgctccatagcctcctccactaaagtgtccacctacgccaacagtagggcaatacccaccaggaaaactaaaattctcattcatctcattgatccaataataaacttctccaagggtagctccggcttcaacccacgcagtttggctatgaatatctactttgaccgtatgcatgtttctcaagtctactatagcaaatgggacttgagatatgtaggacaaaccctcagcatcatggccaccgcttcgagttcgaatctgcaaaccaactttcttggagcagagaatactggcctggatatgggagacatttgaaggagtgacaataacgagtggttttggggttgtatcagaggtgaatctaagattttgtattgtcgaattcaggacagacatatacaattggtcgtgttgagtgtatatgaattttggatttgctggattgttaggaatatattccgagaagcatttaaggaagttttcttgaggattagctattgaaatttggatattgaatgagagaaagaaaaatattattttgcaaacaaaccaaaaggagaatgttgagcaattcatttttcttcagtcctaatgatattttgaattattatgaatagagaactatcctatttataatattatatattggagttgggggaaatgaattgacataaat

SEQ ID NO: 91 - DNA, 1837 bp, Cannabis sp.
aagaaagacaatttattttattacatatatcttatgatagtctacacagttgtaatgtagattttcatacttgggagcatacatagtatgggtagataattaatgatgacgcggtggaagaggtgggatactttgttcgtttctaaaaaaattattgggatcagctttggttttcaccttaactaacctgttaaaatttttaccaaaatacttttcaccccaaatacgtgcttgtgtgtaattattaggactctcaggattagtttttcctaaatcaaggtccctataattgagatacgccaatcttggattttgggacacataaggagttgtgaaattataaacacttcgaacccagtttatatgcttttcgttatcttcttgcttctcccaggtagcagtgtaccaaagttcatacattattccagctcgatgagggaatggaattgctgattctgaaatctcatccattataccaccgtaagggtacaacacatacatcccaactcctacctcttcttcatataatttttccaaaattttgaccattgcagtttcaggtattagtttcttaacatagtctaacttaattgagaaagccgtcttcttcccagctgatctatcaagcaaaatttcctttttaaaattagcagtgttgtaatttacaacaccactgtagaagatggttgtatcaatccagctcaattctttgcaatcagtttttttaatacccaactcaggaaagctcttgttcatcaagtcaactagactatccactccaccaagaaaaatggaagagaagtaaccatgtactgtagtcttattcttcccatgattatctgtaatattcctagttctgaagtgagtcgtgagcattaaatctttgtcatacttgtaagcaatattttgccatttgttaaataacttgacaagcccatgtatctccatgttctttttaacactgaatatagtagcctttgatgggacaacaacaagtttgattttccatgctgcaatgattccaaagttttctcctcctccaccacgtatagcccaaaatagatcttctcccatggattttcgatctagaacttttccatcaacattgactaagtgtgcatcaatgatattatcagccgcaaggccataatttcgcatcaatgctccatagcctcctccactaaagtgtccacctacgccaacagtagggcaatacccaccaggaaaactaaaattctcattcatctcattgatccaataataaacttctccaagggtagctccggcttcaacccacgcagtttggctatgaatatctactttgaccgtatgcatgtttctcaagtctactatagcaaatgggacttgagatatgtaggacaaaccctcagcatcatggccaccgcttcgagttcgaatctgcaaaccaactttcttggagcagagaatactggcctggatatgggagacatttgaaggagtgacaataacgagtggttttggggttgtatcagaggtgaatctaagattttgtattgtcgaattcaggacagacatatacaattggtcgtgttgagtgtatatgaattttggatttgctggattgttaggaatatattccgagaagcatttaaggaagttttcttgaggattagctattgaaatttggatattgaatgagagaaagaaaaatattattttgcaaacaaaccaaaaggagaatgttgagcaattcatttttcttcagtcctaatgatattttgaattattatgaatagagaactatcctatttataatattatatattggagttggggcaaatgaattgacataaat

SEQ ID NO: 92 - DNA, 1837 bp, Cannabis sp.; identical to SEQ ID NO: 91

SEQ ID NO: 93 - DNA, 1834 bp, Cannabis sp.
aaagacaatttattttattacatatatcttatgatagtctacacagttgtaatgtagattttcatacttgggagcatacatagtatgggtagataattaatgatgacgcggtggaagaggtgggatactttgttcgtttctaaaaaaattattgggatcagctttggttttcaccttaactaacctgttaaaatttttaccaaaatacttttcaccccaaatacgtgcttgtgtgtaattattaggactctcaggattagtttttcctaaatcaaggtccctataattgagatacgccaatcttggattttgggacacataaggagttgtgaaattataaacacttcgaacccagtttatatgcttttcgttatcttcttgcttctcccaggtagcagtgtaccaaagttcatacattattccagctcgatgagggaatggaattgctgattctgaaatctcatccattataccaccgtaagggtacaacacatacatcccaactcctacctcttcttcatataatttttccaaaattttgaccattgcagtttcaggtattagtttcttaacatagtctaacttaattgagaaagccgtcttcttcccagctgatctatcaagcaaaatttcctttttaaaattagcagtgttgtaatttacaacaccactgtagaagatggttgtatcaatccagctcaattctttgcaatcagtttttttaatacccaactcaggaaagctcttgttcatcaagtcaactagactatccactccaccaagaaaaatggaagagaagtaaccatgtactgtagtcttattcttcccatgattatctgtaatattcctagttctgaagtgagtcgtgagcattaaatctttgtcatacttgtaagcaatattttgccatttgttaaataacttgacaagcccatgtatctccatgttctttttaacactgaatatagtagcctttgatgggacaacaacaagtttgattttccatgctgcaatgattccaaagttttctcctcctccaccacgtatagcccaaaatagatcttctcccatggattttcgatctagaacttttccatcaacattgactaagtgtgcatcaatgatattatcagccgcaaggccataatttcgcatcaatgctccatagcctcctccactaaagtgtccacctacgccaacagtagggcaatacccaccaggaaaactaaaattctcattcatctcattgatccaataataaacttctccaagggtagctccggcttcaacccacgcagtttggctatgaatatctactttgaccgtatgcatgtttctcaagtctactatagcaaatgggacttgagatatgtaggacaaaccctcagcatcatggccaccgcttcgagttcgaatctgcaaaccaactttcttggagcagagaatactggcctggatatgggagacatttgaaggagtgacaataacgagtggttttggggttgtatcagaggtgaatctaagattttgtattgtcgaattcaggacagacatatacaattggtcgtgttgagtgtatatgaattttggatttgctggattgttaggaatatattccgagaagcatttaaggaagttttcttgaggattagctattgaaatttggatattgaatgagagaaagaaaaatattattttgcaaacaaaccaaaaggagaatgttgagcaattcatttttcttcagtcctaatgatattttgaattattatgaatagagaactatcctatttataatattatatattggagttggggcaaatgaattgacataaat

SEQ ID NO: 94 - DNA, 1356 bp, Cannabis sp.
tagtgaaatctaatcaaataaattgaccctttcctctgatatcaattgttagcccaagaaatatttttaagagggggttgaattggaaatttaagctaatctaacttaattgagaaagccgtcttcttcccagctgatctatcaagcaaaatttcctttttaaaattagcagtgttgtaatttacaacaccactgtagaagatggttgtatcaatccagctcaattctttgcaatcagtttttttaatacccaactcaggaaagctcttgttcatcaagtcaactagactatccactccaccaagaaaaatggaagagaagtaaccatgtactgtagtcttattcttcccatgattatctgtaatattcctagttctgaagtgagtcgtgagcattaaatctttgtcatacttgtaagcaatattttgccatttgttaaataacttgacaagcccatgtatctccatgttctttttaacactgaatatagtagcctttgatgggacaacaacaagtttgattttccatgctgcaatgattccaaagttttctcctcctccaccacgtatagcccaaaatagatcttctcccatggattttcgatctagaacttttccatcaacattgactaagtgtgcatcaatgatattatcagccgcaaggccataatttcgcatcaatgctccatagcctcctccactaaagtgtccacctacgccaacagtagggcaatacccaccaggaaaactaaaattctcattcatctcattgatccaataataaacttctccaagggtagctccggcttcaacccacgcagtttggctatgaatatctactttgaccgtatgcatgtttctcaagtctactatagcaaatgggacttgagatatgtaggacaaaccctcagcatcatggccaccgcttcgagttcgaatctgcaaaccaactttcttggagcagagaatactggcctggatatgggagacatttgaaggagtgacaataacgagtggttttggggttgtatcagaggtgaatctaagattttgtattgtcgaattcaggacagacatatacaattggtcgtgttgagtgtatatgaattttggatttgctggattgttaggaatatattccgagaagcatttaaggaagttttcttgaggattagctattgaaatttggatattgaatgagagaaagaaaaatattattttgcaaacaaaccaaaaggagaatgttgagcaattcatttttcttcagtcctaatgatattttgaattattatgaatagagaactatcctatttataatattatatattggagttggggcaaatgaattgacataaat

SEQ ID NO: 95 - DNA, 1356 bp, Cannabis sp.; identical to SEQ ID NO: 94

SEQ ID NO: 96 - DNA, 1839 bp, Cannabis sp.
tttatgtcaattcatttgccccaactccaatatataatattataaataggatagttctctattcataataattcaaaatatcattaggactgaagaaaaatgaattgctcaacattctccttttggtttgtttgcaaaataatatttttctttctctctcattcaatatccaaatttcaatagctaatcctcaagaaaacttccttaaatgcttctcggaatatattcctaacaatccagcaaatccaaaattcatatacactcaacacgaccaattgtatatgtctgtcctgaattcgacaatacaaaatcttagattcacctctgatacaaccccaaaaccactcgttattgtcactccttcaaatgtctcccatatccaggccagtattctctgctccaagaaagttggtttgcagattcgaactcgaagcggtggccatgatgctgagggtttgtcctacatatctcaagtcccatttgctatagtagacttgagaaacatgcatacggtcaaagtagatattcatagccaaactgcgtgggttgaagccggagctacccttggagaagtttattattggatcaatgagatgaatgagaattttagttttcctggtgggtattgccctactgttggcgtaggtggacactttagtggaggaggctatggagcattgatgcgaaattatggccttgcggctgataatatcattgatgcacacttagtcaatgttgatggaaaagttctagatcgaaaatccatgggagaagatctattttgggctatacgtggtggaggaggagaaaactttggaatcattgcagcatggaaaatcaaacttgttgttgtcccatcaaaggctactatattcagtgttaaaaagaacatggagatacatgggcttgtcaagttatttaacaaatggcaaaatattgcttacaagtatgacaaagatttaatgctcacgactcacttcagaactaggaatattacagataatcatgggaagaataagactacagtacatggttacttctcttccatttttcttggtggagtggatagtctagttgacttgatgaacaagagctttcctgagttgggtattaaaaaaactgattgcaaagaattgagctggattgatacaaccatcttctacagtggtgttgtaaattacaacactgctaattttaaaaaggaaattttgcttgatagatcagctgggaagaagacggctttctcaattaagttagactatgttaagaaactaatacctgaaactgcaatggtcaaaattttggaaaaattatatgaagaagaggtaggagttgggatgtatgtgttgtacccttacggtggtataatggatgagatttcagaatcagcaattccattccctcatcgagctggaataatgtatgaactttggtacactgctacctgggagaagcaagaagataacgaaaagcatataaactgggttcgaagtgtttataatttcacaactccttatgtgtcccaaaatccaagattggcgtatctcaattatagggaccttgatttaggaaaaaataatcctgagagtcctaataattacacacaagcacgtatttggggtgaaaagtattttggtaaaaattttaacaggttagttaaggtgaaaaccaaagctgatcccaataatttttttagaaacgaacaaagtatcccacctcttccaccgcgtcatcattaattatctacccatactatgtatgctcccaagtatgaaaatctacattacaactgtgtagactatcataagatatatgtaataaaataaattgtctttctta

SEQ ID NO: 97 - DNA, 1837 bp, Cannabis sp.; identical to SEQ ID NO: 91

SEQ ID NO: 98 - DNA, 1833 bp, Cannabis sp.
taagaaagacaatttatttattacatatatcttatgatagtcttacacagttgtaatgtagattttcatacttgggagcatacatagtatggtagataattaatgatgacgcggtggaagaggtgggatactttgttcgtttctaaaaaaattattggatcagctttggtttcacctaactaacctgttaaaatttttaccaaaatacttttcaccccaaatacgtgcttgtgtgtaattattaggactctcaggattagtttttcctaaatcaaggtccctataattgagatacgccaatcttggattttgggacacataaggagttgtgaaattaataaacacttcgaaccagtttatatgcttttcgttatcttcttgctctcccaggtagcagtgtaccaaagttcatacattattccagctcgatgagggaatggaattgctgattctgaaatctcatccattataccaccgtaagggtacaacacatacatcccaactcctacctcttcttcatataatttttccaaaattttgaccattgcagtttcaggtattagtttcttaacatagtctaacttaattgagaaagccgtcttcttcccagctgatctatcaagcaaaatttcctttttaaaattagcagtgttgtaatttacaacaccactgtagaagatggttgtatcaatccagctcaattctttgcaatcagtttttttaatacccaactcaggaaagctcttgttcatcaagtcaactagactatccactccaccaagaaaaatggaagagaagtaaccatgtactgtagtcttattcttcccatgattatctgtaatattcctagttctgaagtgagtcgtgagcattaaatctttgtcatacttgtaagcaatattttgccatttgttaaataacttgacaagcccatgtatctccatgttctttttaacactgaatatagtagcctttgatgggacaacaacaagtttgattttccatgctgcaatgattccaaagttttctcctcctccaccacgtatagcccaaaatagatcttctcccatggattttcgatctagaacttttccatcaacattgactaagtgtgcatcaatgatattatcagccgcaaggccataatttcgcatcaatgctccatagcctcctccactaaagtgtccacctacgccaacagtagggcaatacccaccaggaaaactaaaattctcattcatctcattgatccaataataaacttctccaagggtagctccggcttcaacccacgcagtttggctatgaatatctactttgaccgtatgcatgtttctcaagtctactatagcaaatgggacttgagatatgtaggacaaaccctcagcatcatggccaccgcttcgagttcgaatctgcaaaccaactttcttggagcagagaatactggcctggatatgggagacatttgaaggagtgacaataacgagtggttttggggttgtatcagaggtgaatctaagattttgtattgtcgaattcaggacagacatatacaattggtcgtgttgagtgtatatgaattttggatttgctggattgttaggaatatattccgagaagcatttaaggaagttttcttgaggattagctattgaaatttggatattgaatgagagaaagaaaaatattattttgcaaacaaaccaaaaggagaatgttgagcaattcatttttcttcagtcctaatgatattttgaattattatgaatagagaactatcctatttataatattatatattggagttggggcaaatgaattgacataaat

SEQ ID NO: 99 - DNA, 1836 bp, Cannabis sp.
aagaaagacaatttattttattacatatatcttatgatagtctacacagttgtaatgtagattttcatacttgggagcatacatagtatgggtagataattaatgatgacgcggtggaagaggtgggatactttgttcgtttctaaaaaaattattgggatcagctttggttttcaccttaactaacttgttaaaatttttaccaaaatacttttcaccccaaatacgtgcttgtgtgtaattattaggactctcaggattagtttttcctaaatcaaggtccctataattgagatacgccaatcttggattttgggacacataaggagttgtgaaattataaacacttcgaacccagtttatattcttttcgttatcttcttgcttctcccaggtagcagtgtaccaaagttcatacattattccagctcgatgagggaatggaattgctgattctgaaatctcatccattataccaccgtaagggtacaacacatacatcccaactcctacctcttcttcatataatttttccaaaattttgaccattgcagtttcaggtattagtttcttaacatagtctaacttaattgagaaagccgtcttcttcccagctgatctatcaagcaaatttcctttttaaaattagcagtgttgtaatttacaacaccactgtagaagatggttgtatcaatccagctcaattctttgcaatcagtttttttaatacccaactcaggaaagctcttgttcatcaagtcaactagactatccactccaccaagaaaaatggaagagaagtaaccatgtactgtagtcttattcttcccatgattatctgtaatattcctagttctgaagtgagtcgtgagcattaaatctttgtcatacttgtaagcaatattttgccatttgttaaataacttgacaagcccatgtatctccatgttctttttaacactgaatatagtagcctttgatgggacaacaacaagtttgattttccatgctgcaatgattccaaagttttctcctcctccaccacgtatagcccaaaatagatcttctcccatggattttcgatctagaacttttccatcaacattgactaagtgtgcatcaatgatattatcagccgcaaggccataatttcgcatcaatgctccatagcctcctccactaaagtgtccacctacgccaacagtagggcaatacccaccaggaaaactaaaattctcattcatctcattgatccaataataaacttctccaagggtagctccggcttcaacccacgcagtttggctatgaatatctactttgaccgtatgcatgtttctcaagtctactatagcaaatgggacttgagatatgtaggacaaaccctcagcatcatggccaccgcttcgagttcgaatctgcaaaccaactttcttggagcagagaatactggcctggatatgggagacatttgaaggagtgacaataacgagtggttttggggttgtatcagaggtgaatctaagattttgtattgtcgaattcaagacagacatatacaattggtcgtgttgagtgtatatgaattttggatttgctggattgttaggaatatattccgagaagcatttaaggaagttttcttgaggattagctattgaaatttggatattgaatgagagaaagaaaaatattattttgcaaacaaaccaaaaggagaatgttgagcaattcatttttcttcagtcctaatgatattttgaattattatgaatagagaactatcctatttataatattatatattggagttggggcaaatgaattgacataaat

SEQ ID NO: 100 - DNA, 1831 bp, Cannabis sp.
aagaaagacaatttattttattacatatatcttatgatagtctacacagttgtaatgtagattttcatacttgggagcatacatagtatgggtagataattaatgatgacgcggtggaagaggtgggatactttgttcgtttctaaaaaaattattgggatcagctttggttttcaccttaactaacctgttaaaatttttaccaaaatacttttcaccccaaatacgtgcttgtgtgtaattattaggactctcaggattagttttcctaaatcaaggtccctataattgagatacgccaatcttggattttgggacacataaggagttgtgaaattataaacacttcgaacccagtttatatgcttttcgttatcttcttgcttctcccaggtagcagtgtaccaaagttcatacattattccagctcgatgagggaatggaattgctgattctgaaatctcatccattataccacgtaagggtacaacacatacatcccaactcctacctcttcttcatataatttttccaaaattttgaccattgcagtttcaggtattagtttcttaacatagtctaacttaattgagaaagccgtcttcttcccagctgatctatcaagaaaatttcctttttaaaattagcagtgttgtaatttacaacaccactgtagaagatggttgtatcaatccagctcaattctttgcaatcagtttttttaatacccaactcaggaaagctcttgttcatcaagtcaactagactatccactccaccaagaaaaatggaagagaagtaaccatgtactgtagtcttattcttcccatgattatctgtaatattcctagttctgaagtgagtcgtgagcattaaatctttgtcatacttgtaagcaatattttgccatttgttaaataacttgacaagcccatgtatctccatgttctttttaacactgaatatagtagcctttgatgggacaacaacaagtttgattttccatgctgcaatgattccaaagttttctcctcctccaccacgtatagcccaaaatagatcttctcccatggattttcgatctagaacttttccatcaacattgactaagtgtgcatcaatgatattatcagccgcaaggccataatttcgcatcaatgctccatagcctcctccactaaagtgtccacctacgccaacagtagggcaatacccaccaggaaaactaaaattctcattcatcttgatccaataataaacttctccaagggtagctccggcttcaacccacgcagtttggctatgaatatctactttgaccgtatgcatgtttctcaagtctactatagcaaatgggacttgagatatgtaggacaaaccctcagcatcatggccaccgcttcgagttcgaatctgcaaaccaactttcttggagcagagaatactggcctggatatgggagacatttgaaggagtgacaataacgagtggttttggggttgtatcagaggtgaatctaagattttgtattgtcgaattcaggacagacatatacaattggtcgtgttgagtgtatatgaattttggatttgctggattgttaggaatatattccgagaagcatttaaggaagttttcttgaggattagctattgaaatttggatattgaatgagagaaagaaaaatattattttgcaaacaaaccaaaaggagaatgttgagcaattcatttttcttcagtcctaatgatattttgaattattatgaatagagaactatcctatttataatattatatattggagttggggcaaatgaattgacataaat

SEQ ID NO: 101 - DNA, 1837 bp, Cannabis sp.
aagaaagacaatttattttattacatatatcttatgatagtctacacagttgtaatgtagattttcatacttgggagcatacatagtatgggtagataattaatgatgacgcggtggaagaggtgggatactttgttcgtttctaaaaaaattattgggatcagctttggttttcactttaactaacctgttaaaatttttaccaaaatacttttcaccccaaatacgtgcttgtgtgtaattattaggactctcaggattagtttttcctaaatcaaggtccctataattgagatacgccaatcttggattttgggacacataaggagttgtgaaattataaacacttcgaacccagtttatatgcttttcgttatcttcttgcttctcccaggtagcagtgtaccaaagttcatacattattccagctcgatgagggaatggaattgctgattctgaaatctcatccattataccaccgtaagggtacaacacatacatcccaactcctacctcttcttcatataatttttccaaaattttgaccattgcagtttcaggtattagtttcttaacatagtctaacttaattgagaaagccgtcttcttcccagctgatctatcaagcaaaatttcctttttaaaattagcagtgttgtaattgacaacaccactgtagaagatggttgtatcaatccagctcaattctttgcaatcagtttttttaatacccaactcaggaaagctcttgttcatcaagtcaactagactatccactccaccaagaaaaatggaagagaagtaaccatgtactgtagtcttattcttcccatgattatctgtaatattcctagttctgaagtgagtcgtgagcattaaatctttgtcatacttgtaagcaatattttgccatttgttaaataacttgacaagcccatgtatctccatgttctttttaacactgaatatagtagcctttgatgggacaacaacaagtttgattttccatgctgcaatgattccaaagttttctcctcctccaccacgtatagcccaaaatagatcttctcccatggattttcgatctagaacttttccatcaacattgactaagtgtgcatcaatgatattatcagccgcaaggccataatttcgcatcaatgctccatagcctcctccactaaagtgtccacctacgccaacagtagggcaatacccaccaggaaaactaaaattctcattcatctcattgatccaataataaacttctccaagggtagctccggcttcaacccacgcagtttggctatgaatatctactttgaccgtatgcatgtttctcaagtctactatagcaaatgggacttgagatatgtaggacaaaccctcagcatcatggccaccgcttcgagttcgaatctgcaaaccaactttcttggagcagagaatactggcctggatatgggagacatttgaaggagtgacaataacgagtggttttggggttgtatcagaggtgaatctaagattttgtattgtcgaattcaggacagacatatacaattggtcgtgttgagtgtatatgaattttggatttgctggattgttaggaatatattccgagaagcatttaaggaagttttcttgaggattagctattgaaatttggatattgaatgagagaaagaaaaatattattttgcaaacaaaccaaaaggagaatgttgagcaattcatttttcttcagtcctaatgatattttgaattattatgaatagagaactatcctatttataatattatatattggagttggggcaaatgaattgacataaat

SEQ ID NO: 102 - DNA, 1837 bp, Cannabis sp.
gagcatacataatatgagtagataaactatatacaataaatgtatgtatggtataatgattaactaattgataagggaaatatatctatttaaagataattaatgatgatgcggtggaagaggtgggatactttgttcgtttctaaaaaaattattgggatcaactttagttttcaccttaactaacctgttaaaatttttaccaaaatacttttcaccccaaatacgtgcttgtgtgtaattattaggactcgcatgattagtttttcctaaatcaaggtccctataattgagatacgccaatcttggattttgggacacataaggagtcgtaaaattataaacacttcgaacccagtttatatgcttttcattatcttcttgcttctcccaggaagcagtgtaccaaagttcatacattattccagctcgatgagggaatggaattgctgattctgaaatctcctccattataccaccgtaagggtacaacacatacatcccagctcctacatcttcttcatataatttttccaaaattttgaccattgcagtttctggaattggtttcttaacatagtctaacttaattgagaaagccgtcttcttcccagctgatctatcaagcaaaatttcctttttaaaattagcagtgttaaaatttacaacaccactgtagaagatggttgtatcaatccagctaaattctttgcaatcagtttttttaatacccaactcacgaaagctcttgttcatcaagtcgactagactatccactccaccatgaaaaattgaagagaagtaaccatgtactgtagtcttattcttcccatgattatctgtaatattctttgttatgaagtgagtcatgagtactaaatctttgtcatacttgtaagcaatattttgccatttgttaaataacttgacaagcccatgtatctccatgttctttttaacactgaatatagtagactttgatgggacagcaaccagtttgattttccatgctgcaatgattccaaagttttctcctccaccaccacgtatagcccaaaacagatcttctcccatggattttcgatctagaacttttccatcaacattgactaagtgtgcatcaataatattatcagccgcaaggccataatttcgcatcaatgctccatagcctcctccactaaagtgtccacctacgccaacagtagggcaatacccaccaggaaaactaagattctcattcttctcattgatccaataataaacttctccaagggtagctccggcttcaacccacgcagtttggctatgaacatctattttgatcgaatgcatgtttctcaagtctactacaacaaatgggacttgagatatgtaggacataccctcagcatcatggccaccgcttcgagttcgaatctgcaagccaactttcttagagcataaaatagttgcttggatatgggagttatttgaaggagtgacaataacgagtggttttggggttgtatcagagatgaatctaagattttgtattgtcgaattcaggatagacatatacaattggtcgtgttgagtgtatacgagttttggatttgctacattgttgggaatatgttttgagaagcatttaaggaagttttctcgaggattagctattgaaatttggatatggaatgagagaaagaaaaatattattttgcaaacaaaccaaaaggaaaatgctgagcaattcatttttcttcagtcctaatgattttttgaattattaggaattgagaactatcctatttataatattatatattggagttggggcaaataaattgacttaaat

SEQ ID NO: 103 - DNA, 1837 bp, Cannabis sp.
tttaagtcaatttatttgccccaactccaatatataatattataaataggatagttctcaattcctaataattcaaaaaatcattaggactgaagaaaaatgaattgctcagcattttccttttggtttgtttgcaaaataatatttttctttctctcattccatatccaaatttcaatagctaatcctcgagaaaacttccttaaatgcttctcaaaacatattcccaacaatgtagcaaatccaaaactcgtatacactcaacacgaccaattgtatatgtctatcctgaattcgacaatacaaaatcttagattcatctctgatacaaccccaaaaccactcgttattgtcactccttcaaataactcccatatccaagcaactattttatgctctaagaaagttggcttgcagattcgaactcgaagcggtggccatgatgctgagggtatgtcctacatatctcaagtcccatttgttgtagtagacttgagaaacatgcattcgatcaaaatagatgttcatagccaaactgcgtgggttgaagccggagctacccttggagaagtttattattggatcaatgagaagaatgagaatcttagttttcctggtgggtattgccctactgttggcgtaggtggacactttagtggaggaggctatggagcattgatgcgaaattatggccttgcggctgataatattattgatgcacacttagtcaatgttgatggaaaagttctagatcgaaaatccatgggagaagatctgttttgggctatacgtggtggtggaggagaaaactttggaatcattgcagcatggaaaatcaaactggttgctgtcccatcaaagtctactatattcagtgttaaaaagaacatggagatacatgggcttgtcaagttatttaacaaatggcaaaatattgcttacaagtatgacaaagatttagtactcatgactcacttcataacaaagaatattacagataatcatgggaagaataagactacagtacatggttacttctcttcaatttttcatggtggagtggatagtctagtcgacttgatgaacaagagctttcctgagttgggtattaaaaaaactgattgcaaagaatttagctggattgatacaaccatcttctacagtggtgttgtaaattttaacactgctaattttaaaaaggaaattttgcttgatagatcagctgggaagaagacggctttctcaattaagttagactatgttaagaaaccaattccagaaactgcaatggtcaaaattttggaaaaattatatgaagaagatgtaggagctgggatgtatgtgttgtacccttacggtggtataatggaggagatttcagaatcagcaattccattccctcatcgagctggaataatgtatgaactttggtacactgcttcctgggagaagcaagaagataatgaaaagcatataaactgggttcgaagtgtttataattttacgactccttatgtgtcccaaaatccaagattggcgtatctcaattatagggaccttgatttaggaaaaactaatcatgcgagtcctaataattacacacaagcacgtatttggggtgaaaagtattttggtaaaaattttaacaggttagttaaggtgaaaactaaagttgatcccaataatttttttagaaacgaacaaagtatcccacctcttccaccgcatcatcattaattatctttaaatagatatatttcccttatcaattagttaatcattataccatacatacatttattgtatatagtttatctactcatattatgtatgctcc

SEQ ID NO: 104 - DNA, 1804 bp, Cannabis sp.
taaacaaattatatatataacagatacatgtatggtataaggattaacttatgtataagagaaatagatatatttaaaaataattaatgacgtcgtggcggaagaggtgggatgctttgctcgtttctaaaaaaattattgggatcaactttggttttcaccttaactaacttgtcaaagtttttaccaaagtacttttcaccccagatacgtgcttgggtgtaattattaggactcttgggatcagtttttcctaaatcaaggtccctataattgagatacgccattcttggattttgggacacataaggcgtcatgaaattataaacacttcaaacccagtttatatgcttttcattatcttcttgcttctcccaggtagctgcgtatcaaacttcgtacatgattccagctcgatgagggaaaggaattgttgattctgagatcttgtccattataccaccgtaagggtacaatacatacaccccaactcctacatcttcttcatacaatttctccaaaattttgacaattgcagtttctggaattggtttcttaacgtagtctaacttaactgagaaagctactttctgcccagctgatctatcaagcaaaatttccttttgaaaattagtagtgttataatttacaacaccactgtagaagatggtagtatcaatccagctcaattctttgcaatcagtttttttaatacccaactcaggaaagctcttgttcatcaagttgactagactatctactccaccatggaaaatgcaagagaagtaaccgtgtactgtagtcttattctttccttgattatctataatattcctggttatgaagtgagtcatgagtaataaatctttgtcatacttgtaagcaatattttgccatttattaaataacttgacaagcccatgtatctccatattccttttaacactgaatatagtagcccttgatgggacagcaaccagtctaattttccacgctgcaatgattccaaagttttcacctccaccaccacgtatagcccaaaatagatcttcccccatggattttcgatctagaacttttccatcaacattgactaagtgtgcatcaatgatattatcagctgcgaggccataatttcgcattaatgctctatagcctcctccactaaagtgtccacctacgccaacagtagggcaatacccaccaggaaaactaagattctcattaatccaataataaacttctccaagggtagctccggcttcaacccacgcaatttggctacgaatatctattttcaccgaatgcatgtttctcaagtctactataacaaatgggacttgagatgtgtaggacaaaccctcagcatcatggccaccgcttcgagttcgaatttgcaagcccactttcttggagcatagaatagtggcttggatatgggagacatttgaaggagtgacaataacgagtggttttggggttgtatcagaggtaaatctaagattttgtattgtcaaattcaggacagacatatacaattggtcgtgttgagtgtatacgagttttagatttgctggattgttatgaatatattgggagaagcattttaggaaattttcttgaggattagctattgaaattttgatattgaatgagagaaagaaaaatataattttgtaaacaaacctaaaggagaatgttgagtagtacttcattttttttagtcttaatgatttttgaattactatgaattaagaattgtcctttctataactttatatattggagcggggactgagaaatt

SEQ ID NO: 105 - DNA, 1804 bp, Cannabis sp.; identical to SEQ ID NO: 104

SEQ ID NO: 106 - DNA, 1813 bp, Cannabis sp.
caatttctcagtccccgctccaatataaagttatagaaaggacaattcttaattcatagtaattcaaaaatcattaagactaaaaaaaatgaagtactactcaacattctcctttaggtttgtttacaaaattatatttttctttctctcattcaatatcaaaatttcaatagctaatcctcaagaaaatttcctaaattgcttctcccaatatattcataacaatccagcaaatctaaaactcgtatacactcaacacgaccaattgtatatgtctgtcctgaatttgacaatacaaaatcttagatttacctctgatacaaccccaaaaccactcgttattgtcactccttcaaatgtctcccatatccaagccactattctatgctccaagaaagttggcttgcagattcgaactcgaagcggtggccatgatgctgagggtttgtcctacacatctcaagtcccatttgttatagtagacttgagaaacatgcattcggtgaaaatagatattcgtagccaaactgcgtgggttgaagccggagctacccttggagaagtttattattggattaatgagaagaatgagaatcttagttttcctggtgggtattgccctactgttggcgtaggtggacactttagtggaggaggctatggagcattaatgcgaaattatggcctcgcagctgataatatcattgatgcacacttagtcaatgttgatggaaaagttctagatcgaaaatccatgggggaagatctattttgggctatacgtggtggtggaggtgaaaactttggaatcattgcagcgtggaaaattagactggttgctgtcccatcaagggctactatattcagtgttaaaaggaatatggagatacatgggcttgtcaagttatttaacaaatggcaaaatattgcttacaagtatgacaaagatttattactcatgactcacttcataaccaggaatattatagataatcaaggaaagaataagactacagtacacggttacttctcttgcattttccatggtggagtggatagtctagtcaacttgatgaacaagagctttcctgagttgggtattaaaaaaactgattgcaaagaattgagctggattgatactaccatcttctacagtggtgttgtaaattataacactactaattttcaaaaggaaattttgcttgatagatcagctgggcagaaagtagctttctcaattaagttagactacgttaagaaaccaattccagaaactgcaattgtcaaaattttggagaaattgtatgaagaagatgtaggagttggagtgtatgtattgtacccttacggtggtataatggacaagatctcagaatcaacaattcctttccctcatcgagctggaatcatgtacgaagtttggtacgcagctacctgggagaagcaagaagataatgaaaagcatataaactgggttcgaagtgtttataatttcatgacgccttatgtgtcccaaaatccaagaatggcgtatctcaattatagggaccttgatttaggaaaaactgatcccaagagtcctaataattacacccaagcacgtatctggggtgaaaagtactttggtaaaaactttgacaagttagttaaggtgaaaaccaaagttgatcccaataatttttttagaaacgagcaaagcatcccacctcttccgccacgacgtcattaattatttttaaatatatctatttctcttatacataagttaatgcttataccatacatgtatctgttatatatataatttgtttac

SEQ ID NO: 107 - DNA, 1834 bp, Cannabis sp.
gtggtttcacacttctcttcataaaaggaggttccaagttcgaatccccctcccctaatattaaaaaaatgataacagaaatatatctatttaagacaattaaggacgacgcggtggaagaggtgggatgctttgttcgtttctaaaaaaattattgggatcaaccttggttttcaccttaacaaacctgttaaaatttttactaaaatacttttcaccccaaatacatgcttgtgtgtaattattaggactcttgggattagtttttcctaaatcaaggtccctataattgacatatgcgattctttgattttgggacacataaggagttgtgaaattataaacacttcgaacccaatttatatgcttttgattatcttcttccttttcctaggtagctgcgtaccaaagttcatacatgattccagctcgatgacggaatggaattgctgattctgaaatctcatccattgtaccgccgtaagggatcaaaagatacatcccaactcctacatcttcttcatataatttttccaaaattttgaccattgcgattttcagaattgggttcttaacgtagtctaacttaattgagaaagctgtcttcggcccagctgatcgatcaagcaaaatttcctttttaaaattagcagtgttgaatttacaattcaactatagaagatggtggtatcaattcagctcaattctttgcaatcagtttttttaatacccaactcaggaaagctcttgttcatcaagtcaaccaaactatccgctccaccatggaaaatggaagggaagtaatcgtgtactgttgttttattctttccttgattatctgtagtatttttggttatgaagtgagtcatgagtaataaatctttgtcatacttgtaagcaatattttgccatttatcaaataacttgacaagcccatgtatctccatattctttttaacactgaatatagtagactttgacaggacatcaaccagtctgattttccacgctgtaattattccaaagtttctcctccaccaccacgtatagcccaaaacatatcttctctcatggattttcgatctagaaactttccatcaacattgactatgtgtgcatcaatgatattattagccgcgaggccataatttcgtatcaatgctccatagcctcctccactaaagtgtccacctgcgccaacagtagggcaaaacccaccaggaaaactaagattctcattcttctcattgatctggaagtaaacttctccaagggtagctccagcttcaacccatgcagtttggctacgaacatctattttgatcaaatgtatgtttctcaagtctactataatgaatgggacttgagatatgtaggacaaaccctcagcatcgtggctaccgcttcaagttcgaatctacaagtcaactttcttggagcatagaattggggcttggatgtgggagacatttgaaggagtgacgataacgagtggttttggggttgcatcagagttgaatctaagattttgtatttttgaattcaggacagacatatacaagtggtcattatgagtgtatacgagttttggatttgctgcattgttgggaatatgttgcgagaagcatttaaggaaattttctcgaggattagctatggaaatttggatattgaatgagagaagaaaaatattattttgcaaacaaaccaaaaggaaaatgttgagtacttcatctttctttagtcctaatgatttttgaattactatgaatagaaaattatgctatttatagcattatatattggagcgggggcaaagaaattaactaaatat

SEQ ID NO: 108 - DNA, 1825 bp, Cannabis sp.
gtggtttcacacttctcttcataaaaggaggttccaagttcgaatccccctcccctaatattaaaaaaatgataacagaaatatatctatttaagacaattaaggacgacgcggtggaagaggtgggatgctttgttcgtttctaaaaaaattattgggatcaaccttggttttcaccttaacaaacctgttaaaatttttactaaaatacttttcaccccaaatacatgcttgtgtgtaattattaggactcttgggattagtttttcctaaatcaaggtccctataattgacatatgcgattctttgattttgggacacataaggagttgtgaaattataacacttcgaacccaatttatatgcttttgattatcttcttccttttcctaggtagctgcgtaccaaagttcatacatgattccagctcgatgacggaatggaattgctgattctgaaatctcatccattgtaccgccgtaagggatcaaaagatacatcccaactcctacatcttcttcatataatttttccaaaattttgaccattgcgattttcagaattgggttcttaacgtagtctaacttaattgagaaagctgtcttcggcccagctgatcgatcaagcaaaatttcctttttaaaattagcagtgttgaatttacaattcaactatagaagatggtggtatcaattcagctcaattctttgcaatcagtttttttaatacccaactcaggaaagctcttgttcatcaagtcaaccaaactatccgctccaccatggaaaatggaagggaagtaatcgtgtactgttgttttattctttccttgattatctgtagtatttttggttatgaagtgagtcatgagtaataaatctttgtcatacttgtaagcaatattttgccatttatcaaataacttgacaagcccatgtatctccatattctttttaacactgaatatagtagactttgacaggacatcaaccagtctgattttccacgctgtaattattccaaagtttctcctccaccaccacgtatagcccaaaacatatcttctctcatggattttcgatctagaaactttccatcaacattgactatgtgtgcatcaatgatattattagccgcgagcgccataatttcgtatcaatgctccatagcctcctccactaaagtgtccacctgcgccaacagtagggcaaaacccaccaggaaaactaagattctcattcttctcattgatctggaagtaaacttctccaagggtagctccagcttcaaccatgcagtttggctacgaacatcttttgatgtatgtttctcaagtctactataatgaatgggacttgagatatgtaggacaaaccctcagcatcgtggctaccgctcaagttcgaatctacaagtcaactttcttggagcatagaattggggcttggatgtgggagacatttgaaggagtgacgataacgagggttttggggttgcatcagagttgaatctaagattttgtatttttgaattcaggacagacatatacaagtggtcattatgagtgtatacgagttttggatttgctgcattgttggcgaatatgttgcgagaagcatttaaggaaattttctcgaggattagctatggaaatttggatattgaatgagagaagaaaaatattattttgcaaacaaaccaaaaggaaaatgttgagtacttcatctttctttagtcctaatgatttttgaattactatgaatagaaaattatgctatttatagcattatatattggagcgggggcaaagaaattaactaaatat

SEQ ID NO: 109 - DNA, 1625 bp, Cannabis sp.
gtggtttcacacttcttttcataaaaggaggttccaagttcgaatccccctcccctaatattaaaaaaatgataacagaaatatatctatttaagacaattaaggacgacgcggtggaagaggtgggatgctttgttcgtttctaaaaaaattattgggatcaaccttggttttcaccttaacaaacctgttaaaatttttactaaaatacttttcaccccaaatacatgcttgtgtgtaattattaggactcctgggattagtttttcctaaatcaaggtccctataattgagatatgcgaatctttgattttaggacacataaggagttgtgaaattataaacacttcgaacccaatttatatgcttttgattatcttcttgcttttcctaggtagctgcgtaccaaagttcatacatgattccagctcgatgacggaatggaattgctgattctgaaatctcatccattgtaccgccgtacgggatcaaaagatacatcccaactcctacatcttcttcatataatttttccaaaattttgaccattgcgattttcggaattgggtgcttaacgtagtctaacttaattgagaaagctgtcttcggcccagctgatcgatcaagcaaaatttcctttttaaaattagcagtgttgaatttacaattccactgtagaagatggtggtatcaattcagctcaattctttgcaatcagtttttttaatacccaactcaggaaagctcttgttcatcaagtcaaccaaactatccgctccaccatggaaaatggaagggaagtaaccgtgtactgttgttttattctttccttgattatctgtagtatttttggttatgaagtgagtcatgagtaataaatctttgtcatacttgtaagcaatattttgccatttatcaaataacttgacaagcccatgtatctccatattctttttaacactgaatatagtagactttgacatgacatcaaccagtttgattttccacagtgtaattattccaaagtttctcctccaccaccacgtatagcccaaaacatatcttctcccatggattttcgatctagaaactttccatcaacattgactatgtgtgcatcaatgatattattagccgcgaggccataatttcgtatcaatgatccatagcctcctccactaaagtgtccacctgcgccaacagtagggcaaaacccaccaggaaaattaagattctcattcttctcattgatccggaagtaaacttctccaagggtagctccagcttcaacccatgcagtttggctacgaacatctattttgatcaaatgtatgtttctcaagtctactataacgaatgggacttgagatatgtaggacaaaccctcagcatcgtggctaccgcttcaagttcgaatctacaagtcaactttcttggagcatagaattggggcttggatgtgggagacatttgaaggagtgacgataacgagtggttttggggttgcatcagagttgaatctaagtgttgaccgacattttcggcaactaataaaatattataaaattactgagctgtaagaaagtgagagaaggatttttacgtggttggggcgttaatgagcc

SEQ ID NO: 110 - DNA, 1625 bp, Cannabis sp.
gtggtttcacacttcttttcataaaaggaggttccaagttcgaatccccctcccctaatattaaaaaaatgataacagaaatatatctatttaagacaattaaggacgacgcggtggaagaggtgggatgctttgttcgtttctaaaaaaattattgggatcaaccttggttttcaccttaacaaacctgttaaaatttttactaaaatacttttcaccccaaatacatgcttgtgtgtaattattaggactcctgggattagtttttcctaaatcaaggtccctataattgagatatgcgaatctttgattttaggacacataaggagttgtgaaattataaacacttcgaacccaatttatatgcttttgattatcttcttgcttttcctaggtagctgcgtaccaaagttcatacatgattccagctcgatgacggaatggaattgctgattctgaaatctcatccattgtaccgccgtacgggatcaaaagatacatcccaactcctacatcttcttcatataatttttccaaaattttgaccattgcgattttcggaattgggtgcttaacgtagtctaacttaattgagaaagctgtcttcggcccagctgatcgatcaagcaaaatttcctttttaaaattagcagtgttgaatttacaattccactgtagaagatggtggtatcaattcagctcaattctttgcaatcagtttttttaatacccaactcaggaaagctcttgttcatcaagtcaaccaaactatccgctccaccatggaaaatggaagggaagtaaccgtgtactgttgttttattctttccttgattatctgtagtatttttggttatgaagtgagtcatgagtaataaatctttgtcatacttgtaagcaatattttgccatttatcaaataacttgacaagcccatgtatctccatattctttttaacactgaatatagtagactttgacatgacatcaaccagtctgattttccacagtgtaattattccaaagtttctcctccaccaccacgtatagcccaaaacatatcttctcccatggattttcgatctagaaactttccatcaacattgactatgtgtgcatcaatgatattattagccgcgaggccataatttcgtatcaatgatccatagcctcctccactaaagtgtccacctgtgccaacagtagggcaaaacccaccaggaaaattaagattctcattcttctcattgatccggaagtaaacttctccaagggtagctccagcttcaacccatgcagtttggctacgaacatctattttgatcaaatgtatgtttctcaagtctactataacgaatgggacttgagatatgtaggacaaaccctcagcatcgtggctaccgcttcaagttcgaatctacaagtcaactttcttggagcatagaattggggcttggatgtgggagacatttgaaggagtgacgataacgagtggttttggggttgcatcagagttgaatctaagtgttgaccgacattttcggcaactaataaaatattataaaattactgagctgtaagaaagtgagagaaggatttttacgtggttggggcgttaatgagcc

SEQ ID NO: 111 - DNA, 1623 bp, Cannabis sp.
gctcattaacgccccaaccacgtaaaaatccttctctcactttcttacagctcagtaattttataatattttattagttgccgaaaatgtcggtcaacacttagattcaactctgatgcaaccccaaaaccactcgttatcgtcactccttcaaatgtctcccacatccaagccccaattctatgctccaagaaagttgacttgtagattcgaacttgaagcggtagccacgatgctgagggtttgtcctacatatctcaagtcccattcgttatagtagacttgagaaacatacatttgatcaaaatagatgttcgtagccaaactgcatgggtgaagctggagctacccttggagaagtttacttccggatcaatgagaagaatgagaatcttaattttcctggtgggttttgccctactgttggcacaggtggacactttagtggaggaggctatggatcattgatacgaaattatggcctcgcggctaataatatcattgatgcacacatagtcaatgttgatggaaagtttctagatcgaaaatccatgggagaagatatgttttgggctatacgtggtggtggaggagaaactttggaataattacactgtggaaaatcagactggttgatgtcatgtcaaagtctactatattcagtgttaaaaagaatatggagatacatgggcttgtcaagttatttgataaatggcaaaatattgcttacaagtatgacaaagatttattactcatgactcacttcataaccaaaaatactacagataatcaaggaaagaataaaacaacagtacacggttacttcccttccattttccatggtggagcggatagtttggttgacttgatgaacaagagctttcctgagttgggtattaaaaaaactgattgcaaagaattgagctgaattgataccaccatcttctacagtggaattgtaaattcaacactgctaattttaaaaaggaaattttgcttgatcgatcagctgggccgaagacagctttctcaattaagttagactacgttaagcaccaattccgaaaatcgcaatggtcaaaattttggaaaaattatatgaagaagatgtaggagttgggatgtatcttttgatcccgtacggcggtacaatggatgagatttcagaatcagcaattccattccgtcatcgagctggaatcatgtatgaactttggtacgcagctacctaggaaaagcaagaagataatcaaaagcatataaattgggttcgaagtgtttataatttcacaactccttatgtgtcctaaaatcaaagattcgcatatctcaattatagggaccttgatttaggaaaaactaatcccaggagtcctaataattacacacaagcatgtatttggggtgaaaagtattttagtaaaaattttaacaggtttgttaaggtgaaaaccaaggttgatcccaataatttttttagaaacgaacaaagcatcccacctcttccaccgcgtcgtccttaattgtcttaaatagatatatttctgttatcattttttaatattaggggagggggattcgaacttggaacctccttttatgaaaagaagtgtgaaaccacta

SEQ ID NO: 112 - DNA, 1824 bp, Cannabis sp.
cattaaaatagagtttagttaaggcacaaaaacccaacattatttatgttataaggactaataatttgataagagaaatagatctatttaagataattaatgatgacgcaggggaagaggtgggaatgctttgttcgtttctaaagaaattatcgggatcaaccttggtttttacttttactaacctattaaaatttttaccaaaatacttttcaccccaaatacgtgcttgtgtgtaattattaggactctcgaaattagtttttcctaaatcaaggtccctataattgagatacgccattcttggattttgggacacataaggagtcgtgaaattataaacattccgaatccagtttatatgcttttcattatcttcttgcttctcccatgaagctatgtaccaaatttcatacatgattccagctcgatgagggaatggaattgctgattctgaaatctcatccattataccaccataagggtaaaacacaaacatcccaactcctacatcttcttcatataatttttccaaaattgtgaccattgcggtttctggaatcggtttcttaacatagtctaacttaatcgagaaagccgccttccgcccacctgatctatcaagcaaatttctttttaaaattagttgtgttgtaatttacaacgaccactgtagaagatgatagtatcaatccagctcaactgtttgcaatctgtttttttaatacccaattcaggaaagctcttgttcatcaagtcgactagactatccactccaccatggaaaatggaggagaagtaactgtgtattgttgtcttattcttcccttgattatctgtaatattcctggttataaagtgagtaaagagtaataattctttttcatacatgtaagcaatattttgccatttgttaactaacttgacaagctcatgtatctccatgttctttttaacactgaatatagtagacattgatgggacagcaacaagtctaattttccacgctgcaatgattccaaagttttctcctccaccaccacgtatagcccaaaacaaatcttcccccatggatttcgatctaaaacttttccatcaacattgactaagtgcgcatcaatgatattatcagccgcgaggccataatttcgcatcaatgctccatagcctcctccactaaagtgtccacccgcgccaacagtagggcagtacccagcaggaaaactaagattctcattgttctcattgatccaataataaacttctccaagggtagctccggcttcaacccatgcagtttggctatgaacatctattttgaccgaatgcatgtttctcaagtctactataacaaatgggacttgagatatgtaggacatgccctcagcatcatgaccaccgcttcgagttcgaatctgcaagccaactttcttggagcatagaatagtgccttggatatgggagacatttaaaggagtgatgataacaagtggttttggggttgtgtcagaggtacatctaagattttgtatggtcgaattcaggatagacatataaaattggtcgtgttgagtgtatacgagttttgcatttgttacattggtgggaatatattgtgagaagcatttaaggaagttttcttgaggattagctattgaaatttggatattgaatgagagaaagaaaaatattatcttgcaaacataccaaaacagaatgttgagtacttcatttttctttagtcgtaatgttggcaattactatgaatggaaaactatctatttatagctttatagattggagtggggggtaaagaaattaact

SEQ ID NO: 113 - DNA, 1826 bp, Cannabis sp.
attaaaatagagttttagttaaggcacaaaaacccaacattatttatgttataaggactaataatttgataagagaaatagatctatttaagataattaatgatgacgcaggggaagaggtggaatgctttgttcgtttctaaagaaattatcgggatcaaccttggtttttacttttactaacctattaaaatttttaccaaaatacttttcaccccaaatacgtgcttgtgtgtaattattaggactctcgaaattagtttttcctaaatcaaggtccctataattgagatacgccattcttggattttgggacacataaggagtcgtgaaattataaacattccgaatccagtttatatgcttttcattatcttcttgcttctcccatgaagctatgtaccaaatttcatacatgattccagctcgatgagggaatggaattgctgattctgaaatctcatccattataccaccataagggtaaaacacaaacatcccaactcctacatcttcttcatataatttttccaaaattgtgaccattgcggtttctggaatcggtttcttaacatagtctaacttaatcgagaaagccgccttccgcccacctgatctatcaagcaaaatttcttttttaaaattagttgtgttgtaatttacaacaccactgtagaagatgatagtatcaatccagctcaactgtttgcaatctgtttttttaatacccaattcaggaaagctcttgttcatcaagtcgactagactatccactccaccatggaaaatggaggagaagtaactgtgtattgttgtcttattcttcccttgattatctgtaatattcctggttataaagtgagtaaagagtaataattctttttcatacatgtaagcaatattttgccatttgttaactaacttgacaagctcatgtatctccatgttctttttaacactgaatatagtagacattgatgggacagcaacaagtctaattttccacgctgcaatgattccaaagttttctcctccaccaccacgtatagcccaaaacaaatcttcccccatggattttcgatctaaaacttttccatcaacattgactaagtgcgcatcaatgatattatcagccgcgaggccataatttcgcatcaatgctccatagcctcctccactaaagtgtccacccgcgccaacagtagggcagtacccagcaggaaaactaagattctcattgttctcattgatccaataataaacttctccaagggtagctccggcttcaacccatgcagtttggctatgaacatctattttgaccgaatgcatgtttctcaagtctactataacaaatgggacttgagatatgtaggacatgccctcagcatcatgaccaccgcttcgagttcgaatctgcaagccaactttcttggagcatagaatagtgccttggatatgggagacatttaaaggagtgatgataacaagtggttttggggttgtgtcagaggtaaatctaagattttgtatggtcgaattcaggatagacatataaaattggtcgtgttgagtgtatacgagttttgcatttgttacattggtgggaatatattgtgagaagcatttaaggaagttttcttgaggattagctattgaaatttggatattgaatgagagaaagaaaaatattatcttgcaaacataccaaaaacagaatgttgagtacttcatttttctttagtcgtaatgttggcaattactatgaatggaaaactattctatttatagctttatagattggagtgggggtaaagaaattaact

SEQ ID NO: 114 - DNA, 1827 bp, Cannabis sp.
attaaaatagagttttagttaaggcacaaaaacccaacattatttatgttataaggactaataatttgataagagaaatagatctatttaagataattaatgatgacgtaggggaagaggtgggatgctttgttcgtttctaagaaattatcgggatcaaccttggtttttacttttactaacctattaaaatttttaccaaaatacttttcaccccaaatacgtgcttgtgtgtaattattaggactctcgaaattagtttttcctaaatcaaggtccctataattgagatacgccattcttggattttgggacacataaggagtcgtgaaattataaacattccgaatccagttatatgcttttcattatcttcttgcttctcccatgaagctatgtaccaaatttcatacatgattccagctcgatgagggaatggaattgctgattctgaaatctcatccattataccaccataagggtaaacacaaacatcccaactcctacatcttcttcatataatttttccaaaattgtgaccattgcggtttctggaatcggtttcttaacatagtctaacttaatcgagaaagccgccttccgcccacctgatctatcaagcaaaatttcttttttaaaattagttgtgttgtaatttacaacaccactgtagaagatgatagtatcaatccagctcaactgtttgcaatctgtttttttaatacccaattcaggaaagctcttgttcatcaagtcgactagactatccactccaccatggaaaatggaggagaagtaactgtgtattgttgtcttattcttcccttgattatctgtaatatcctggttataagtgagtaaagagtaataattcttttcatacatgtaagcaatattttgccatttgttaactaacttgacaagctcatgtatctccatgttctttttaacacatgaatatagtagacattgatgggacagcaacaagtctaatttccacgctgcaatgattccaaagttttctcctccaccaccacgtatagcccaaaacaaatcttcccccatggattttcgatctaaaacttttccatcaacattgactaagtgcgcatcaatgatattatcagccgcgaggccataatttcgcatcaatgctccatagcctcctccactaaagtgtccacccgcgccaacagtagggcagtacccagcaggaaaactaagattctcattgttctcattgatccaataataaacttctccaagggtagctccggcttcaacccatgcagtttggcttatgaacatctattttgaccgaatgcatgtttctcaagtctactataacaaatgggacttcagatatgtaggacatgccctcagcatcatgaccaccgcttcgagttcgaatctgcaagccaactttcttggagcatagaatagtgccttggatatgggagacatttaaaggagtgatgataacaagtggttttggggttgtttcagaggtaaatctaagattttgtatggtcgaatttaggatagacatataaaattggtcgtgttgagtgtatacgagttttgcatttgttacattggtgggaatatattgtgagaagcatttaaggaagttttcttgaggattagctattgaattggatattgaatgagagaaagaaaaatattatcttgcaaacataccaaaaacagaatgttgagtacttcatttttctttagtcgtaatgttggcaattactatgaatggaaaactatcctatttatagctttatagattgagtgggggtaaagaaattaactaaatatgtt

SEQ ID NO: 115 - DNA, 1834 bp, Cannabis sp.
attaaaatagagttttagttaaggcacaaaaacccaacattatttatgttataaggactaataatttgataagagaaatagatctatttaagataattaatgatgacgtaggggaagaggtgggatgctttgttcgtttctaaagaaattatcgggatcaaccttggtttttacttttactaacctattaaaatttttaccaaaatacttttcaccccaaatacgtgcttgtgtgtaattattaggactctcgaaattagtttttcctaaatcaaggtccctataattgagatacgccattcttggattttgggacacataaggagtcgtgaaattataaacattccgaatccagtttatatgcttttcattatcttcttgcttctcccatgaagctatgtaccaaatttcatacatgattccagctcgatgagggaatggaattgctgattctgaaatctcatccattataccaccataagggtaaaacacaaacatcccaactcctacatcttcttcatataatttttccaaaattgtgaccattgcggtttctggaatcggtttcttaacatagtctaacttaatcgagaaagccgccttccgcccacctgatctatcaagcaaaatttcttttttaaaattagttgtgttgtaatttacaacaccactgtagaagatgatagtatcaatccagctcaactgtttgcaatctgtttttttaatacccaattcagcaaagctcttgttcatcaagtcgactagactatccactccaccatggaaaatggaggagaagtaactgtgtattgttgtcttattcttcccttgattatctgtaatattcctggttataaagtgagtaaagagtaataattctttttcatacatgtaagcaatattttgccatttgttaactaacttgacaagctcatgtatctccatgttctttttaacactgaatatagtagacattgatgggacagcaacaagtctaattttccacgctgcaatgattccaaagttttctcctccaccaccacgtatagcccaaaacaaatcttcccccatggattttcgatctaaaacttttccatcaacattgactaagtgcgcatcaatgatattatcagccgcgaggccataatttcgcatcaatgctccatagcctcctccactaaagtgtccacccgcgccaacagtagggcagtacccagcaggaaaactaagattctcattgttctcattgatccaataataaacttctccaagggtagctccggcttcaacccatgcagtttggctatgaacatctattttgaccgaatgcatgtttctcaagtctactataacaaatgggacttcagatatgtaggacatgccctcagcatcatgaccaccgcttcgagttcgaatctgcaagccaactttcttggagcatagaatagtgccttggatatgggagacatttaaaggagtgatgataacaagtggttttggggttgtttcagaggtaaatctaagattttgtatggtcgaatttaggatagacatataaaattggtcgtgttgagtgtatacgagttttgcatttgttacattggtgggaatatattgtgagaagcatttaaggaagttttcttgaggattagctattgaaatttggatattgaatgagagaaagaaaaatattatcttgcaaacataccaaaaacagaatgttgagtacttcatttttctttagtcgtaatgttggcaattactatgaatggaaaactatcctatttatagctttatagattggagtgggggtaaagaaattaactaaatattt

SEQ ID NO: 116 - DNA, 1816 bp, Cannabis sp.
aatattagttaatttctttacccccactccaatctataaagctataaataggatagtttttccattcctagtaattgccaacattacgactaaagaaaaatgaagtactcaacatctgtttttggtatgtttgcaagataatattttctttctctcattcaatatccaaatttcaagagctaatcctcaagaaaacttccttaaatgcttctcacaatatattcccaccaaatgtaacaaatgcaaaactcgtatacactcaacacgaccaattttatatgtctatcctaaatcgaccatacaaaatcttagaatttacctctgaaacaaccccaaaaccacttgttatcatcactcctttaaatgtctcccatatccaaggcactattctatgctccaagaaagttggcttgcagattcgaactcgaagcggtggtcatgatgctgagggcatgtcctacatatctgaagtcccatttgttatagtagacttgagaaacatgcattcggtcaaaatagatgttcatagccaaactgcatgggttgaagccggagctacccttggagaagtttattattggatcaatgagaacaatgagaatcttagttttcctgctgggtactgccctactgttggcgcgggtggacactttagtggaggaggctatggagcattgatgcgaaattatggcctcgcggctgataatatcattgatgcgcacttagtcaatgttgatggaaaagttttagatcgaaaatccatgggggaagatttgttttgggctatacgtggtggtggaggagaaaactttggaatcattgcagcgtggaaaattagacttgttgctgtcccatcaatgtctactatattcagtgttaaaaagaacatggagatacatgagcttgtcaagttagttaacaaatggcaaaatattgcttacatgtatgaaaaagaattattactctttactcactttataaccaggaatattacagataatcaagggaagaataagacaacaatacacagttacttctcctccattttccatggtggagtggatagtctagtcgacttgatgaacaagagctttcctgaattgggtattaaaaaacagattgcaacagttgagctggattgatactatcatcttctacagtggtgttgtaaattacaacacaactaattttaaaaaagaaattttgcttgatagatcaggtgggcggaaggcggctttcctcgattagttagactatgttaagaaaccgattccagaaaccgcaatggtcacaattttggaaaaattatatgaagaagatgtaggagttgggatgtttgtgttttacccttatggtggtataatggatgagatttcagaatcagcaattccattccctcatcgagctggaatcatgtatgaaatttggtacatagcttcatgggagaagcaagaagataatgaaaagcatataaactggattcggaatgtttataatttcacgactccttatgtgtcccaaaatccaagaatggcgtatctcaattatagggaccttgatttaggaaaaactaatttcgagagtcctaataattacacacaagcacgtattggggtgaaaagtatttggtaaaaattttaataggttagtaaaagtaaaaaccaaggttgatcccgataatttctttagaaacgaacaaagcatcccacctcttcccctacgtcatcattaattatcttaaatagatctatttctcttatcaaattattagtccttataacataaataatgttgggtttttgtgcctaactaaact

SEQ ID NO: 117 - DNA, 1835 bp, Cannabis sp.
aatatttagttaatttctttacccccactccaatctataaagctataaataggatagttttccattcatagtaattgccaacattacgactaaagaaaaatgaagtactcaacattctgtttttggtatgtttgcaagataatatttttctttctctcattcaatatccaaatttcaatagctaatcctcaagaaaacttccttaaatgcttctcacaatatattcccaccaatgtaacaaatgcaaaactcgtatacactcaacacgaccaattttatatgtctatcctaaattcgaccatacaaaatcttagatttacctctgaaacaaccccaaaaccacttgttatcatcactcctttaaatgtctcccatatccaaggcactattctatgctccaagaaagttggcttgcagattcgaactcgaagcggtggtcatgatgctgagggcatgtcctacatatctcaagtcccatttgttatagtagacttgagaaacatgcattcggtcaaaatagatgttcatagccaaactgcatgggttgaagccggagctacccttggagaagtttattattggatcaatgagaacaatgagaatcttagttttcctgctgggtactgccctactgttggcgcgggtggacactttagtggaggaggctatggagcattgatgcgaaattatggcctcgcggctgataatatcattgatgcgcacttagtcaatgttgatggaaaagttttagatcgaaaatccatgggggaagatttgttttgggctatacgtggtggtggaggagaaaactttggaatcattgcagcgtggaaaattagacttgttgctgtcccatcaatgtctactatattcagtgttaaaaagaacatggagatacatgagcttgtcaagttagttaacaaatggcaaaatattgcttacatgtatgaaaaagaattattactctttactcactttataaccaggaatattacagataatcaagggaagaataagacaacaatacacagttacttctcctccattttccatggtggagtggatagtctagtcgacttgatgaacaagagctttcctgaattgggtattaaaaaaacagattgcaaacagttgagctggattgatactatcatcttctacagtggtgttgtaaattacaacacaactaattttaaaaaagaaattttgcttgatagatcaggtgggcggaaggcggctttctcgattaagttagactatgttaagaaaccgattccagaaaccgcaatggtcacaattttggaaaaattatatgaagaagatgtaggagttgggatgtttgtgttttacccttatggtggtataatggatgagatttcagaatcagcaattccattccctcatcgagctggaatcatgtatgaaatttggtacatagcttcatgggagaagcaagaagataatgaaaagcatataaactggattcggaatgtttataatttcacgactccttatgtgtcccaaaatccaagaatggcgtatctcaattatagggaccttgatttaggaaaaaactaatttcgagagtcctaataattacacacaagcacgtatttggggtgaaaagtattttggtaaaaattttaataggttagtaaaagtaaaaaccaaggttgatcccgataatttctttagaaacgaacaaagcatcccacctcttcccctgcgtcatcattaattatcttaaatagatctatttctcttatcaaattattagtccttataacataaataatgttgggtttttgtgccttaactaaaactctattttaatg

SEQ ID NO: 118 - DNA, 1833 bp, Cannabis sp.
aatatttagttaatttctttacccccactccaatctataaagctataaataggatagttttccattcatagtaattgccaacattacgactaaagaaaaatgaagtactcaacattctgtttttggtatgtttgcaagataatatttttctttctctcattcaatatccaaatttcaatagctaatcctcaagaaaacttccttaaatgcttctcacaatatattcccaccaatgtaacaaatgcaaaactcgtatacactcaacacgaccaattttatatgtctatcctaaattcgaccatacaaaatcttagatttacctctgaacaaccccaaaaccacttgttatcatcactcctttaaatgtctcccatatccaaggcactattctatgctccaagaaagttggcttgcagattcgaactcgaagcggtggtcatgatgctgagggcatgtcctacatatctcaagtcccatttgttatagtagacttgagaaacatgcattcggtcaaaatagatgttcatagccaaactgcatgggttgaagccggagctacccttggagaagtttattattggatcaatgagaacaatgagaatcttagttttcctgctgggtactgccctactgttggcgcgggtggacactttagtggaggaggctatggagcattgatgcgaaattatggcctcgcggctgataatatcattgatgcgcacttagtcaatgttgatggaaaagttttagatcgaaaatccatgggggaagatttgttttgggctatacgtggtggtggaggagaaaactttggaatcattgcagcgtggaaaattagacttgatgctgtcccatcaatgtctactatattcagtgttaaaaagaacatggagatacatgagcttgtcaagttagttaacaaatggcaaaatattgcttacatgtatgaaaaagaattattactctttactcactttataaccaggaatattacagataatcaagggaagaataagacaacaatacacagttacttctcctccattttccatggtggagtggatagtctagtcgacttgatgaacaagagctttcctgaattgggtattaaaaaaacagattgcaaacagttgagctggattgatactatcatcttctacagtggtgttgtaaattacaacacaactaattttaaaaaagaaattttgcttgatagatcaggtgggcggaaggcggctttctcgattaagttagactatgttaagaaaccgattccagaaaccgcaatggtcacaattttggaaaaattatatgaagaagatgtaggagttgggatgtttgtgttttacccttatggtggtataatggatgagatttcagaatcagcaattccattccctcatcgagctggaatcatgtatgaaatttggtacatagcttcatgggagaagcaagaagataatgaaaagcatataaactggattcggaatgtttataatttcacgactccttatgtgtcccaaaatccaagaatggcgtatctcaattatagggaccttgatttaggaaaaactaatttcgagagtcctaataattacacacaagcacgtatttggggtgaaaagtattttggtaaaaattttaataggttagtaaaagtaaaaaccaaggttgatcacgataatttctttagaaacgaacaaagcatcccacctcttcccctgcgtcatcattaattatcttaaatagatctatttctcttatcaaattattagtccttataacataaataatgttgggtttttgtgccttaactaaaactctattttaatg

SEQ ID NO: 119 - DNA, 1831 bp, Cannabis sp.
aatatttagttaatttctttacccccactccaatctataaagctataaataggatagttttccattcatagtaattgccaacattacgactaaagaaaaatgaagtactcaacattctgtttttggtatgtttgcaagataatatttttctttctctcattcaatatccaaatttcaatagctaatcctcaagaaaacttccttaaatgcttctcacaatatattcccaccaatgtaacaaatgcaaaactcgtatacactcaacacgaccaattttatatgtctatcctaaattcgaccatacaaaatcttagatttacctctgacacaaccccaaaaccacttgttatcatcactcctttaaatgtctcccatatccaaggcactattctatgctccaagaaagttggcttgcagattcgaactcgaagcggtggtcatgatgctgagggcatgtcctacatatctcaagtcccatttgttatagtagacttgagaaacatgcattcggtcaaaatagatgttcatagccaaactgcatgggttgaagccggagctacccttggagaagtttattattggatcaatgagaacaatgagaatcttagttttcctgctgggtactgccctactgttggcgcgggtggacactttagtggaggaggctatggagcattgatgcgaaattatggcctcgcggctgataatatcattgatgcgcacttagtcaatgttgatggaaaagttttagatcgaaaatccatgggggaagatttgttttgggctatacgtggtggtggaggagaaaactttggaatcattgcagcgtggaaaattagacttgttgctgtcccatcaatgtctactatattcagtgttaaaaagaacatggagatacatgagcttgtcaagttagttaacaaatggcaaaatattgcttacatgtatgaaaaagaattattactctttactcactttataaccaggaatattacagataatcaagggaagaataagacaacaatacacagttacttctcctccattttccatggtggagtggatagtctagtcgacttgatgaacaagagctttcctgaattgggtattaaaaaaacagattgcaaacagttgagctggattgatactatcatcttctacagtggtgttgtaaattacaacacaactaattttaaaaaagaaattttgcttgatagatcaggtgggcggaaggcggctttctcgattaagttagactatgttaagaaaccgattccagaaaccgcaatggtcacaattttggaaaaattatatgaagaagatgtaggagttgggatgtttgttttacccttatggtggtataatggatgagatttcagaatcagcaattccattccctcatcgagctggaatcatgtatgaaatttggtacatagcttcatgggagaagcaagaagataatgaaaagcatataaactggattcggaatgtttataatttcacgactccttatgtgtcccaaaatccaagaatggcgtatctcaattatagggaccttgatttaggaaaaactaatttcgagagtcctaataattacacacaagcacgtatttggggtgaaaagtattttggtaaaaattttaataggttagtaaaagtaaaaaccaaggttgatcccgataatttctttagaaacgaacaaagcatccacctcttcccctgcgtcatcattaattatcttaaatagatctatttctcttatcaaattattagtccttataacataaataatgttgggtttttgtgccttaactaaactctattttaatgt

SEQ ID NO: 120 - DNA, 1828 bp, Cannabis sp.
aatatttagttaatttctttacccccactccaatctataaagctataaataggatagttttccattcatagtaattgccaacattacgactaaagaaaaatgaagtactcaacattctgtttttggtatgtttgcaagataatattttctttctctcattcaatatccaaatttcaatagctaatcctcaagaaaacttaaatgcttctcacaatatattcccaccaatgtaacaaatgcaaaactcgtatacactcaacacgaccaattttatatgtctatcctaaattcgaccatacaaaatcttagatttacctctgacacaaccccaaaaccacttgttatcatcactcctttaaatgtctcccatatccaaggcactattctatgctccaagaaagttggcttgcagattcgaactcgaagcggtggtcatgatgctgagggcatgtcctacatatctcaagtcccatttgttatagtagacttgagaaacatgcattcggtcaaaatagatgttcatagccaaactgcatgggttgaagccggagctacccttggagaagtttattattggatcaatgagaacaatgagaatcttagttttcctgctgggtactgccctactgttggcgcgggtggacactttagtggaggaggctatggagcattgatgcgaaattatggcctcgcggctgataatatcattgatgcgcacttagtcaatgttgatggaaaagttttagatcgaaaatccatgggggaagatttgttttgggctatacgtggtggtggaggagaaaactttggaatcattgcagcgtggaaaattagacttgttgctgtcccatcaatgtctactatattcagtgttaaaaagaacatggagatacatgagcttgtcaagttagttaacaaatggcaaaatattgcttacatgtatgaaaaagaattattactctttactcactttataaccaggaatattacagataatcaagggaagaataagacaacaatacacagttacttctcctcattttccatggtggagtggatagtctagtcgacttgatgaacaagagctttcctgaattgggtattaaaaaaacagattgcaaacagttgagctggattgatactatcatcttctacagtggtgttgtaaattacaacacaactaattttaaaaaagaaattttgcttgatagatcaggtgggcggaaggcggctttctcgattaagttagactatgttaagaaaccgattccagaaaccgcaatggtcacaattttggaaaaattatatgaagaagatgtaggagttgggatgtttgtgttttacccttatggtggtataatggatgagatttcagaatcagcaattccattccctcatcgagctggaatcatgtatgaaatttggtacatagcttcatgggagaagcaagaagataatgaaaagcatataaactggattcggaatgtttataatttcacgactccttatgtgtcccaaaatccaagaatggcgtatctcaattatagggaccttgatttaggaaaaactaatttcgagagtcctaataattacacacaagcacgtatttggggtgaaaagtattttggtaaaaattttaataggttagtaaaagtaaaaaccaaggttgatcccgataatttctttagaaacgaacaaagcatcccacctcttcccctgcgtcatcattaattatcttaaatagatctatttctcttatcaaattattagtccttataacataaataatgttgggtttttgtgccttaactaaaactctattttaatg

SEQ ID NO: 121 - DNA, 1178 bp, Cannabis sp.
attaaaatagagttttagttagggcacaaaaacccaacattatttatgttataaggactaataatttgataagagaaatagatctatttaagataattaatgatgacgtaggggaagaggtgggatgctttgttcgtttctaaagaaattatcgggatcaaccttggtttttacttttactaacctattaaattttttaccaaaatacttttcaccccaaatacgtgcttgtgtgtaattattaggactctcgaaattagtttttcctaaatcaaggtccctataattgagatacgccattcttggattttgggacacataaggagtcgtgaaattgtaaacattctgaatccagtttatatgcttttcattatcttcttgcttctcccatgaagctatgtaccaaatttcatacatgattccagctcgatgagggaatggaattgctgattctgaaatctcatccattattccaccataagggtaaaacacaaacatcccaactcctacatcttcttcatataatttttccaaaattgtgaccattgcggtttctggaatcggtttcttaacttagtctaacttaatcgagaaagccgccttccgcccacctgatctatcaagcaaaagttcttttttaaaattagtagtgttgtaatttacaagaccactgtagaagatgatagtatcaatccagctcaactgtttgcaatctgtttttttaatacccaattcaggaaagctcttgttcatcaagtcgactagactatccactccaccatggaaaatggaggagaagtaactatgtattgttgtcttattctttccttgattatctgtaatattcctggttataaagtgagtaaagagtaataattctttttcatacatgtaagcaatattttgccatttgttaactaacttgacaagctcatgtatctccatgttctttttattactgaatatagtagacattgatgggacagcaacaagtctaattttccacgctgcaatgattccaaagttttctcctccaccaccacgtatagcccaaaacaaatcttcccccatggattttttaattaacaatctaatcaatgcaagattataatgtcaatcatgatatatatcaaatatcatttagctcatacctttatacaactatggcacttaattgc

SEQ ID NO: 122 - DNA, 1164 bp, Cannabis sp.
caattaagtgccatagttgtataaaggtatgagctaaatgatatttgatatatatcatgattgacattataatcttgcattgattagattgttaattaaaaaatccatgggggaagatttgttttgggctatacgtggtggtggaggagaaaactttggaatcattgcagcgtggaaaattagacttgttgctgtcccatcaatgtctactatattcagtaataaaaagaacatggagatacatgagcttgtcaagttagttaacaaatggcaaaatattgcttacatgtatgaaaaagaattattactctttactcactttataaccaggaatattacagataatcaaggaaagaataagacaacaatacatagttacttctcctccattttccatggtggagtggatagtctagtcgacttgatgaacaagagctttcctgaattgggtattaaaaaaacagattgcaaacagttgagctggattgatactatcatcttctacagtggtcttgtaaattacaacactactaattttaaaaaagaacttttgcttgatagatcaggtgggcggaaggcggctttctcgattaagttagactaagttaagaaaccgattccagaaaccgcaatggtcacaattttggaaaaattatatgaagaagatgtaggagttgggatgtttgtgttttacccttatggtggaataatggatgagatttcagaatcagcaattccattccctcatcgagctggaatcatgtatgaaatttggtacatagcttcatgggagaagcaagaagataatgaaaagcatataaactggattcagaatgtttacaatttcacgactccttatgtgtcccaaaatccaagaatggcgtatctcaattatagggaccttgatttaggaaaaactaatttcgagagtcctaataattacacacaagcacgtatttggggtgaaaagtattttggtaaaaaatttaataggttagtaaaagtaaaaccaaggttgatcccgataatttctttagaaacgaacaaagcatcccacctcttcccctacgtcatcattaatatcttaaatagatctatttctcttatcaaattattagtccttataacataaataatgttgggttttgtgccctaactaaaact

SEQ ID NO: 123 - DNA, 1831 bp, Cannabis sp.
aatatttagttaatttctttacccccactctaatctataaagctataaataggatagttttccattcatagtaattgccaacattacgactaaagaaaaatgaagtactcaacattctgtttttggtatgtttgcaagataatatttttctttctctcattcaatatccaaatttcaatagctaatcctgaaggaaacttccttaaatgcttctcacaatatattcccaccaatgtaacaaatgcaaaactcgtatacactcaacacgaccaattttatatgtctatcctaaattcgaccatacaaaatcttagatttacctttgacacaaccccaaaaccacttgttatcatcactcctttaaatgtctcccatatccaaggcactattctatgctccaagaaagttggcttgtagattcgaactcgaagcggtggtcatgatgctgagggcatgtcctacatatctcaagtcccatttgttatagtaaacttgagaaacatgcattcggtcaaaatagatgttcatagcgaaactgcatgggttgaagccggagctacccttggagaagtttattattggatcaatgagaacaatgagaatcttagttttcttgctgggtactgccctactgttggcgcgggtggacactttagtggaggaggctatggagcattgatgcgaaattatggcctcgcggctaataacatcattgatgcgcacttagtcaatgttgatggaaaagttttagatcgaaaatccatgggggaagatttgttttgggctatacgtggtggaggagaaaactttggaatcattgcagcgtggaaaattagatttgttgctgtcccatcaatgtctactatattcagtgttaaaaagaacatggagatacatgagcttgtcaagttagttaacaaatggcaaaatattgcttacatgtatgaaaaagaatgattactctttactcactttataaccaggaatattacagataatcaagggaagaataagacaacaatacacagttacttctcctccattttctatggtggagtggatagtctagtcgacttgatgaacaagagctttcctgaattgggtattaaaaaaacagattgcaaacagttgagctggattgatactatcatcttctacagtggtcttgtaaattacaacactactaattttaaaaaagaacttttgcttgatagatcaggtgggcggaaggcggctttctcgattaagttagactaagttaagaaaccgattccagaaaccgcaatggtcacaattttggaaaaattatatgaagaagatgtaggagttgggatgtttgtgttttacccttatggtggtataatggatgagatttcagaatcagcaattccattccctcatcgagctggaatcatgtatgaaatttggtacatagcttcatgggagaagcaagaagataatgaaaagcatataaactggattcggaatgtttacaatttcacgactccttatgtgtcccaaaatccaagaatggcgtatctcaattatagggaccttgatttaggaaaaactaatttcgagagtcctaataattacacacaagcacgtatttggggtgaaaagtattttggtaaaaattttaataggttagtaaaagtaaaaaccaaggttgatcccgataatttctttagaaacgaacaaagcatcccacctcttcccctacgtcatcattaattatcttaaatagatctatttctcttatcaaattattagtccttataacataaataatgttgggtttttgtgccctaactaaaactctattttaatg

SEQ ID NO: 124 - DNA, 1831 bp, Cannabis sp.
aatatttagttaatttctttacccccactctaatctataaagctataaataggatagttttccattcatagtaattgccaacattacgactaaagaaaaatgaagtactcaacattctgtttttggtatgtttgcaagataatatttttctttctctcattcaatatccaaatttcaatagctaatcctgaaggaaacttccttaaatgcttctcacaatatattcccaccaatgtaacaaatgcaaaactcgtatacactcaacacgaccaattttatatgtctatcctaaattcgaccatacaaaatcttagatttacctttgacacaaccccaaaaccacttgttatcatcactcctttaaatgtctcccatatccaaggcactattctatgctccaagaaagttggcttgtagattcgaactcgaagcggtggtcatgatgctgagggcatgtcctacatatctcaagtcccatttgttatagtaaacttgagaaacatgcattcggtcaaaatagatgttcatagcgaaactgcatgggttgaagccggagctacccttggagaagtttattattggatcaatgagaacaatgagaatcttagttttcttgctgggtactgccctactgttggcgcgggtggacactttagtggaggaggctatggagcattgatgcgaaattatggcctcgcggctaataacatcattgatgcgcacttagtcaatgttgatggaaaagttttagatcgaaaatccatgggggaagatttgttttgggctatacgtggtggaggagaaaactttggaatcattgcagcgtggaaaattagacttgttgctgtcccatcaatgtctactatattcagtgttaaaaagaacatggagatacatgagcttgtcaagttagttaacaaatgacaaaatattgcttacatgtatgaaaaagaatgattactctttactcactttataaccaggaatattacagataatcaagggaagaataagacaacaatacacagttacttctcctccattttctatggtggagtggatagtctagtcgacttgatgaacaagagctttcctgaattgggtattaaaaaaacagattgcaaacagttgagctggattgatactatcatcttctacagtggtcttgtaaattacaacactactaattttaaaaaagaacttttgcttgatagatcaggtgggcggaaggcggctttctcgattaagttagactaagttaagaaaccgattccagaaaccgcaatggtcacaattttggaaaaattatatgaagaagatgtaggagttgggatgtttgtgttttacccttatggtggtataatggatgagatttcagaatcagcaattccattccctcatcgagctggaatcatgtatgaaatttggtacatagcttcatgggagaagcaagaagataatgaaaagcatataaactggattcggaatgtttacaatttcacgactccttatgtgtcccaaaatccaagaatggcgtatctcaattatagggaccttgatttaggaaaaactaatttcgagagtcctaataattacacacaagcacgtatttggggtgaaaagtattttggtaaaaattttaataggttagtaaaagtaaaaaccaaggttgatcccgataatttctttagaaacgaacaaagcatcccacctcttcccctacgtcatcattaattatcttaaatagatctatttctcttatcaaattattagtccttataacataaataatgttgggtttttgtgccctaactaaaactctattttaatg

SEQ ID NO: 125 - DNA, 1834 bp, Cannabis sp.
aatatttagttaatttctttacccccactccaatctataaagctataaataggataattttccattcatagtaatttccaacattacgactaaagaaaaatgaagtactcaacattctgtttttggtatgtttgcaagataatatttttctttctctcattcaatatccaaatttcaatagctaatcctcaagaaaacttccttaaatgcttctcacaatatattcccaccaatgtaacaaatgcaaaactcgtatacactcaacacgaccaattttatatgtctatcctaaattcgaccatacaaaatcttagatttacctctgacacaaccccaaaaccacttgttatcatcgctcctttaaatgtctcccatatccaaggcactattctatgctccaagaaagttggcttgcagattcgagctcgaagcagtggtcatgatgctgagggcatgtcctacatatctcaagtcccatttgttatagtagacttgagaaacatgcattcggtcaaaatagatgttcatagccaaactgcatgggttgaagccggagctacccttggagaagtttattattggatcaatgagaacaatgagaatcttagttttcctgctgggtactgtcctactgttggcgcgggtggacactttagtggaggaggctatggagcattgatgcgaaattatggcctcgcggctgataatatcattgatgcgcacttagtcaatgttgatggaaaagttttagatcgaaaatccatgggggaagatttgttttgggctatacgtggtggtggaggagaaaactctggaatcattgcagcgtggaaaattagacttgttgctgtcccatcaatgtctactatattcagtgttaaaaagaacatggagatacatgagcttgtcaagttagttaaaaaatggcaaaatattgcttacatgtatgaaaaagaattattactctttactcactttataaccaggaatattacagataatcaagggaagaataagacaacaatacactgttacttctcctccattttccatggtggactggatagtctagtcgacttgatgaacaagagctttcctgaattgggtattaaaaaaacagattgcaaacagttgagctggattgatactatcatcttcaacagtggtcttgtaaattacaacactactaattttaaaaaagaaattttgctttaaagatcaggtgggcggaaggcggctttctcaattaagttagactatgttaagaaaccgattccagaaaccgcaatggtcacaattttggaaaaattatatgaagaagatgtaggagttgggatgttcgtgttttacccttatggtggtataatggatgagatttcagaatcagcaattccattccctcatcgagctggaatcatgtatgaaatttggtacatagcttcatgggagaagcaagaagataatgaaaagcatataaactggattcggaatgtttataatttcacgactccttatgtgtcccaaaatccaagaatggcgtatctcaattatagggaccttgatttaggaaaaactaatttcgagagtcctaataattacacacaagcacgtatttggggtgaaaagtattttggtaaaaattttagtaggttagtaaaagtaaaaaccaaggttgatcccgataatttctttagaaacgaacaaagcatcccacctcttcccctgcgtcatcattaattatcttaaatagatctatttctcttatcaaattattagtccttataacataaataatgttgggtttttgcgccttaactaaaactctattttaatg

SEQ ID NO: 126 - DNA, 1834 bp, Cannabis sp.
aatatttagttaatttctttacccccactccaatctataaagctataaataggataattttccattcatagtaatttccaacattacgactaaagaaaaatgaagtactcaacattctgtttttggtatgtttgcaagataatatttttctttctctcattcaatatccaaatttcaatagctaatcctcaagaaaacttccttaaatgcttctcacaatatattcccaccaatgtaacaaatgcaaaactcgtatacactcaacacgaccaattttatatgtctatcctaaattcgaccatacaaaatcttagatttacctctgacacaaccccaaaaccacttgttatcatcactcctttaaatgtctcccatatccaaggcactattctatgctccaagaaagttggcttgcagattcgaactcgaagcggtggtcatgatgctgagggcatgtcctacatatctcaagtcccatttgttatagtagacttgagaaacatgcattcggtcaaaatagatgttcatagccaaactgcatgggttgaagccggagctacccttggagaagtttattattggatcaatgagaacaatgagaatcttagttttcctgctgggtactgccctactgttggcgcgggtggacactttagtggaggaggctatggagcattgatgcgaaattatggcctcgcggctgataatatcattgatgcgcacttagtcaatgttgatggaaaagttttagatcgaaaatccatgggggaagatttgttttgggctatacgtggtggtggaggagaaaactttggaatcattgcagcgtggaaaattagacttgttgctgtcccatcaatgtctactatattcagtgttaaaaagaacatggagatacatgagcttgtcaagttagttaacaaatggcaaaatattgcttacatgtatgaaaaagaattattactctttactcactttataaccaggaatattacagataatcaagggaagaataagacaacaatacactgttacttctcctccattttccatggtggactggatagtctagtcgacttgatgaacaagagctttcctgaattgggtattaaaaaaacagattgcaaacagttgagctggattgatactatcatcttcaacagtggtcttgtaaattacaacactactaattttaaaaaagaaattttgctttaaagatcaggtgggcggaaggcggctttctcaattaagttagactatgttaagaaaccgattccagaaaccgcaatggtcacaattttggaaaaattatatgaagaagatgtaggagttgggatgtttgtgttttacccttatggtggtataatggatgagatttcagaatcagcaattccattccctcatcgagctggaatcatgtatgaaatttggtacatagcttcatgggagaagcaagaagataatgaaaagcatataaactggattcggaatgtttataatttcacgactccttatgtgtcccaaaatccaagaatggcgtatctcaattatagggaccttgatttaggaaaaactaatttcgagagtcctaataattacacacaagcacgtatttggggtgaaaagtattttggtaaaaattttaataggttagtaaaagtaaaaaccaaggttgatcccgataatttctttagaaacgaacaaagcatcccacctcttcccctgcgtcatcattaattatcttaaatagatctatttctcttatcaaattattagtccttataacataaataatgttgggtttttgccttaactaaaactctattttaatgtt

SEQ ID NO: 127 - DNA, 1801 bp, Cannabis sp.
tttacccccactccaatctataaagctataataggatagttttccattcatagtaattgccaacattacgactaaagaaaaatgaagtactcaacattctggtatgtttgcaagatattttttttctctcattcaatatccaaatttcaatagctaatcctcaagaaaacttccttaaatgcttctcacaatatattcccaccaatgtaacaaatgcaaaactcgtatacactcaacacgaccaattttatatgtctatcctaaattcgaccatacaaaatcttagatttacctctgacacaaccccaaaaccacttgttatcatcactcctttaaatgtctcccatatccaaggcactattctatgctccaaaaagttggcttgcagattcgaactcgaagcggtggtcatgatgctgagggcatgtcctacatatctcaagtcccatttgttatagtagacttgagaaacatgcattcggtcaaaatagatgttcatagccaaactgcatgggttgaagccggagctacccttggagaagtttattattggatcaatgagaacaatgagaatcttagttttcctgctgggtactgccctactgttggcggggtggacactttagtggaggaggctatggagcattgatgcgaaattatggcctcgcggctgataatatcattgatgcgcacttagtcaatgttgatggaaaagttttagatcgaaaatccatgggggaagatttgttttgggctatacgtggtggtggaggagaaaactttggaatcattgcagcgtggaaaattagacttgttgctgtcccatcaatgtctactatattcagtgttaaaaagaacatggagatacatgagcttgtcaagttagttaacaaatggcaaaatattgcttacatgtatgaaaaagaattattactctttactcactttataaccaggaatattacagataatcaagggaagaataagacaacaatacacagttacttctcctccattttccatggtggagtggatagtctagtcgacttgatgaacaagagctttcctgaattgggtattaaaaaaacagattgcaaacagttgagctggattgatactatcatcttctacagtggtttgtaaattaacacaactaattttaaaaaagaaattttgcttgatagatcaggtgggcggaaggcggctttctcgattaagttagactatgttaagaaaccgattccagaaaccgcaatggtcacaattttggaaaaattatatgaagaagatgtaggagttgggatgtttgtgttttacccttatggtggtataatggatgagatttcagaatcagcaattccattccctcatcgagctggaatcatgtatgaaatttggtacatagcttcatgggagaagcaagaagataatgaaaagcatataaactggattcggaatgtttataatttcacgactccttatgtgtcccaaaatccaagaatggcgtatctcaattatagggaccttgatttaggaaaaactaatttcgagagtcctaataattacacacaagcacgtatttggggtgaaaagtattttggtaaaaattttaataggttagtaaaagtaaaaaccaaggttgatcccgataatttctttagaaacgaacaaagcatcccacctcttcccctgcgtcatcattaattatcttaaatagatctatttctcttatcaaattattagtccttataacataaataatgttgggtttttgtgccttaactaaaactctattttaatg

SEQ ID NO: 128 - DNA, 1809 bp, Cannabis sp.
ttacccccactccaatctataaagctataaataggatagttttccattcatagtaattgccaacattacgactaaagaaaaatgaagtactcaacattctggtatgtttgcaagataatatttttttttctctcattcaatatccaaatttcaatagctaatcctcaagaaaacttccttaaatgcttctcacaatatattcccaccaatgtaacaaatgcaaaactcgtatacactcaacacgaccaattttatatgtctatcctaaattcgaccatacaaaatcttagatttacctctgacacaaccccaaaaccacttgttatcatcactcctttaaatgtctcccatatccaaggcactattctatgctccaaaaaagttggcttgcagattcgaactcgaagcggtggtcatgatgctgagggcatgtcctacatatctcaagtcccatttgttatagtagacttgagaaacatgcattcggtcaaaatagatgttcatagccaaactgcatgggttgaagccggagctacccttggagaagtttattattggatcaatgagaacaatgagaatcttagttttcctgctgggtactgccctactgttggcgcgggtggacactttagtggaggaggctatggagcattgatgcgaaattatggcctcgcggctgataatatcattgatgcgcacttagtcaatgttgatggaaaagttttagatcgaaaatccatgggggaagatttgttttgggctatacgtggtggtggaggagaaactttggaatcattgtagcgtggaaaattagacttgttgctgtcccatcaatgtctactatattcagtgttaaaaagaacatggagatacatgagcttgtcaagttagttaacaaatggcaaaatattgcttacatgtatgaaaaagaattattactctttactcactttataaccaggaatattacagataatcaagggaagaataagacaacaatacacagttacttctcctccattttccatggtggagtggatagtctagtcgacttgatgaacaagagctttcctgaattgggtattaaaaaaatagattgcaaacagttgagctggattgatactatcatcttctacagtggtcttgtaaattacaacacaactaattttaaaaaagaaattttgcttgatagatcaggtgggcggaaggcggctttctcgattaagttagactatgttaagaaaccgattccagaaaccgcaatggtcacaattttggaaaaattatatgaagaagatgtaggagttgggatgtttgtgttttacccttatggtggtataatggatgagatttcagaatcagcaattccattccctcatcgagctggaatcatgtatgaaatttggtacatagcttcatgggagaagcaagaagataatgaaaagcatataaactggattcggaatgtttataatttcacgactccttatgtgtcccaaaatccaagaatggcgtatctcaattatagggaccttgatttaggaaaaactaattttgagagacctaataattacacacaagcacgtatttggggtgaaaagtattttggtaaaaattttaataggttagtaaaagtaaaaaccaaggttgatcccgataatttctttagaaacgaacaaagcatcccacctcttcccctgcgtcatcattaattatcttaaatagatctatttctcttatcaaattattagtccttataacataaataatgttgggtttttgtgccttaactaaaactctattttaatg

SEQ ID NO: 129 - DNA, 1803 bp, Cannabis sp.
ttacccccactccaatctataaagctataaataggatagttttccattcatagtaattgccaacattacgactaaagaaaaatgaagtactcaacattctggtatgtttgcaagataatatttttttttctctcattcaatatccaaatttcaatagctaatcctcaagaaaacttccttaaatgcttctcacaatatattcccaccaatgtaacaaatgcaaaactcgtatacactcaacacgaccaattttatatgtctatcctaaattcgaccatacaaaatcttagatttacctctgacacaacccaaaaccacttgttatcatcactcctttaaatgtctcccatatccaaggcactattctatgctccaaaaaagttggcttgcagattcgaactcgaagcggtggtcatgatgctgagggcatgtcctacatatctcaagtcccatttgttatagtagacttgagaaacatgcattcggtcaaaatagatgttcatagccaaactgcatgggttgaagccggagctacccttggagaagtttattattggatcaatgagaacaatgagaatcttagttttcctgctgggtactgccctactgttggcgcggtggacactttagtggaggaggctatggagcattgatgcgaaattatggcctcgcggctgataatatcattgatgcgcacttagtcaatgttgatggaaaagttttagatcgaaaatccatggggaagatttgttttgggctatacgtggtggtggaggagaaaactttggaatcattgagcgtggaaaattagacttgttgctgtcccatcaatgtctactatattgtgttaaaaaagaacatggagatacatgagcttgtcaagttagttaacaaatggcaaaatattgcttacatgtatgaaaaagaattattactctttactcactttataaccaggaatattacagataatcaagggaagaataagacaacaatacacagttacttctcctccattttccatggtggagtggatagtctagtcgacttgatgaacaagagctttcctgaattgggtattaaaaaaagattgcaaacagttgagctggattgatactatcatcttctacagtggtcttgtaaattacaacacaactaattttaaaaaagaaattttgcttgatagatcaggtgggcggaaggcggctttctcgattaagttagactatgttaagaaaccgattccagaaaccgcaatggtcacaattttggaaaaattatatgaagaagatgtaggagttgggatgtttgtgttttacccttatggtggtataatggatgagatttcagaatcagcaattccattccctcatcgagctggaatcatgtatgaaatttggtacatagcttcatgggagaagcaagaagataatgaaaagcatataaactggattcggaatgtttataatttcacgactccttatgtgtcccaaaatccaagaatggcgtatctcaattatagggaccttgatttaggaaaaactaatttcgagagtcctaataattacacacaagcacgtatttggggtgaaaagtattttggtaaaaattttaataggttagtaaaagtaaaaaccaaggttgatcccgataatttctttagaaacgaacaaagcatcccacctcttcccctgcgtcatcattaattatcttaaatagatctatttctcttatcaaattattagtccttataacataaataatgttgggtttttgtgccttaactaaaactctattttaatg

SEQ ID NO: 130 - DNA, 1826 bp, Cannabis sp.
attaaaatagagttttagttaaggcacaaaaacccaacattatttatgtaataaggactaataatttgataagagaaatagatctatttaagataattaatgatgacgcaggggaagaggtgggatgctttgttcgtttctaaagaaattatcgggatcaaccttggtttttacttttactaacctattaaaatttttaccaaaatacttttcaccccaaatacgtgcttgtgtgtaattattaggactctcgaaattagtttttcctaaatcaaggtccctataattgagatacgccattcttggattttgggacacataaggagtcgtgaaattataaacattccgaatccagtttatatgcttttcattatcttcttgcttctcccatgaagctatgtaccaaatttcatacgtgattccagctcgatgagggaatggaattgctgattctgaaatctcatccattataccaccataagggtaaaacacaaacatcccaactcctacatcttcttcatataatttttccaaaattgtgaccattgcggtttctggaatcggtttcttaacatagtctaacttaatcgagaaagccgccttccgcccacctgatctatcaagcaaaatttcttttttaaaattagttgtgttgtaatttacaacaccactgtagaagatgatagtatcaatccagctcaactgtttgcaatctgtttttttaatacccaattcaggaaagctcttgttcatcaagtcgactagactatccactccaccatggaaaatggaggagaagtaactgtgtattgttgtcttattcttcccttgattatctgtaatattcctggttataaagtgagtaaagagtaataattctttttcatacatgtaagcaatattttgccatttgttaactaacttgacaagctcatgtatctccatgttctttttaacactgaatatagtagacattgatgggacagcaacaagtctaattttccacgctgcaatgattccaaagttttctcctccaccaccacgtatagcccaaaacaaatcttcccccatggattttcgatctaaaacttttccatcaacattgactaagtgcgcatcaatgatattatcagccgcgaggccataatttcgcatcaatgctccatagcctcctccactaaagtgtccacccgtgccaacagtagggcagtacccagcaggaaaactaagattctcattgttctcattgatccaataataaacttctccaagggtagctccggattcaacccatgcagtttggctatgaacatctattttgaccgaatgcatgtttctcaagtctactataacaaatgggacttgagatatgtaggacatgccctcagcatcatgaccaccgcttcgagttcgaatctgcaagccaactttcttggaacatagaatagtgccttggatatgggagacatttaaaggagtggtgataacaagtggttttggggttgtgtcagaggtaaatctaagattttgtacggtcgaatttaagatagacatataaaattggtcgtgttgagtgtatacgagttttgcatttgttacattggtgggaatatattgtgagaggcatttaaggaagttttcttgaggattagctattgaaatttggatattgaatgagagaaagaaaaatattatcttgcaaacataccaaaaacagaatgttgagtacttcatttttctttagtcataatgttggcaattactatgaatggaaaactatcctatttatagctttatagattggagtgggggtaaagaaattaact

SEQ ID NO: 131 - DNA, 1822 bp, Cannabis sp.
attacaaaatttagttaatttctttaccccctccaatctataaagctataaataggtagttttccattcatagtaattgccaacattacgactaagaaaatgaagtactcaacattctgtttttggtatgtttgcaagatatatttttctttctctcattcaatatccaaatttcaagctaatcctcaagaaaacttccttaactgcctctcacaatatattcccaccaatgtaacaaatgcaaaactcgtatacactcaacacgaccaattttatatgtctatcttaaattcgaccgtacaaatcttagatttacctctgacacaaccccaaacacttgttatcaccactctttaaatgtctcccatatcaaggcactattatgttccaagaaagttggcttgcagattcaaactcgaagcggtggtcatgatgctgagggcatgtcctacatatctcaagtcccatttgttatagtagacttgagaaacatgcattcggtcaaaatagatgttcatagccaaactgcatgggttgaatccggagctacccttggagaagtttattattggatcaatgagaacaatgagaatcttagttttcctgctgggtactgccctactgttggcgggtggacactttagtggaggaggctatggagcattgatgcgaaattatggcctcgcggctgataatatcattgatgcgcacttagtcaatgttgatggaaaagttttagatcgaaaatccatgggggaagatttgttttgggctatacgtggtggtggaggagaaaactttggaatcattgcagcgtggaaaattagacttgttgctgtcccatcaatgtctactatattcagtgttaaaaagaacatggagatacatgagcttgtcaagttagttaacaaatggcaaaatattgcttacatgtatgaaaaagaattattactctttactcactttataaccaggaatattacagataatcaagggaagaataagacaacaatacacagttacttctcctccattttccatggtggagtggatagtctagtcgacttgatgaacaagagctttcctgaattgggtattaaaaaaacagattgcaaacagttgagctggattgatactatcatcttctacagtggtgttgtaaattacaacacaactaattttaaaaaagaaattttgcttgatagatcaggtgggcggaaggcggctttctcgattaagttagactatgttaagaaaccgattccagaaaccgcaatggtcacaattttggaaaaattatatgaagaagatgtaggagttgggatgtttgtgttttacccttatggtggtataatggatgagatttcagaatcagcaattccattccctcatcgagctggaatcatgtatgaaatttggtacatagcttcatgggagaagcaagaagataatgaaaagcatataaactggattcggaatgtttataatttcacgactccttatgtgtcccaaaatccaagaatggcgtatctcaattatagggaccttgatttaggaaaaactaatttcgagagtcctaataattacacacaagcacgtatttggggtgaaaagtattttggtaaaaattttaataggttagtaaaagtaaaaaccaaggttgatcccgataatttctttagaaacgaacaaagcatcccacctcttcccctgcgtcatcattaattatcttaaatagatctatttctcttatcaaattattagtccttatacataaataatgttgggtttttgtgccttaactaaaactctattttaatgt

SEQ ID NO: 132 - DNA, 1834 bp, Cannabis sp.
aatatttagttaatttctttacccccactccaatctataaagctataaataggatagttttccattcatagtaattgccaacattacgactacagaaaaatgaagtactcaacattctgtttttggtatgtttgcaagataatatttttctttctctcattcaatatccaaatttcaatagctaatcctcaagaaaacttccttaaatgcctctcacaatatattcccaccaatgtaacaaatgcaaaactcgtatacactcaacacgaccaattttatatgtctatcttaaattcgaccatacaaaatcttagatttacctctgacacaaccccaaaaccacttgttatcatcactcctttaaatgtctcccatatccaaggcactattctatgctccaagaaagttggcttgcagattcgaactcgaagcggtggtcatgatgctgagggcatgtcctacatatctcaagtcccatttgttatagtagacttgagaaacatgcattcggtcaaaatagatgttcatagccaaaatgcatgggttgaagccggagctacccttggagaagtttattattggatcaatgagaacaatgagaatcttagttttcctgctgggtactgccctactgttggcgctggtggacactttagtggaggaggctatggagcattgatgcgaaattatggcctcgcggctgataatatcattgatgcacacttagtcaatgttgatggaaaagttttagatcgaaaatccatgggggaagatttgttttgggctatacgtggtggtggaggagaaaactttggaatcattgcagcgtggaaaattagacttgttgctgtcccatcaatgtctactatattcagtgttaaaaagaacatggagatacatgagcttgtcaagttagttaacaaatggcaaaatattgcttacatgtatgaaaaagaattattactctttactcactttataaccaggaatattacagataatcaagggaagaataagacaacaatacacagttacttctcctccattttccatggtggagtggatagtctagtcgacttgatgaacaagagctttcctgaattgggtattaaaaaaagagattgcaaacagttgagctggattgatactatcatcttctacagtggtcttgtaaattacaacacaactaattttaaaaaagaaattttgcttgatagatcaggtgggcggaaggcggctttctcgattaagttagactatgttaagaaaccgattccagaaaccgcaatggtcacaattttggaaaaattatatgaagaagatgtaggagttgggatgtttgtgttttacccttatggtggtataatggatgagatttcagaatcagcaattccattccctcatcgagctggaatcatgtatgaaatttggtacatagcttcatgggagaagcaagaagataatgaaaagcatataaactggattcggaatgtttataatttcacgactccttatgtgtcccaaaatccaagaatggcgtatctcaattatagggaccttgatttaggaaaaactaatttcgagagtcctaataattacacacaagcacgtatttggggtgaaaagtattttggtaaaaattttaataggttagtaaaagtaaaaaccaaggttgatcccgataatttctttagaaacgaacaaagcatcccacctcttcccctgcgtcatcattaattatcttaaatagatctatttctcttatcaaattattagtccttataacataaataatgttgggtttttgtgccttaactaaaactctattttaatg

SEQ ID NO: 133 - DNA, 1833 bp, Cannabis sp.
aatatttagttaatttctttacccccactccaatctataaagctataaataggatagttttccattcatagtaattgccaacattacgactacagaaaaatgaagtactcaacattctgtttttggtatgtttgcaagataatatttttctttctctcattcaatatccaaatttcaatagctaatcctcaagaaaacttccttaaatgcctctcacaatatattcccaccaatgtaacaaatgcaaaactcgtatacactcaacacgaccaattttatatgtctatcttaaattcgaccatacaaaatcttagatttacctctgacacaaccccaaaaccacttgttatcatcactcctttaaatgtctcccatatccaaggcactattctatgctccaagaaatttggcttgcagattcgaactcgaagcggtggtcatgatgctgagggcatgtcctacatatctcaagtcccatttgttatagtagacttgagaaacatgcattcggtcaaaatagatgttcatagccaaaatgcatgggttgaagccggagctacccttggagaagtttattattggatcaatgagaacaatgagaatcttagttttcctgctgggtactgccctactgttggcgcttgtggacactttagtggaggaggctatggagcattgatgcgaaattatggcctcgcggctgataatatcattgatgcacacttagtcaatgttgatggaaaagttttagatcgaaaatccatgggggaagatttgttttgggctatacgtggtggtggaggagaaaactttggaatcattgcagcgtggaaaattagacttgttgctgtcccatcaatgtctactatattcagtgttaaaaagaacatggagatacatgagcttgtcaagttagttaacaaatggcaaaatattgcttacatgtatgaaaaagaattattactctttactcactttataaccaggaatattacagataatcaagggaagaataagacaacaatacacagttacttctcctccattttccatggtggagtggatagtctagtcgacttgatgaacaagagctttcctgaattgggtattaaaaaaagagattgcaaacagttgagctggattgatactatcatcttctacagtggtcttgtaaattacaacacaactaattttaaaaaagaaattttgcttgatagatcaggtgggcggaaggcggctttctcgattaagttagactatgttaagaaaccgattccagaaaccgcaatggtcacaattttggaaaaattatatgaagaagatgtaggagttgggatgtttgtgttttacccttatggtggtataatggatgagatttcagaatcagcaattccattcctcatcgagctggaatcatgtatgaaatttggtacatagcttcatgggagaagcaagaagataatgaaaagcatataaactggattcggaatgtttataatttcacgactccttatgtgtcccaaaatccaagaatggcgtatctcaattatagggaccttgatttaggaaaaactaatttcgagagtcctaataattacacacaagcacgtatttggggtgaaaagtattttggtaaaaattttaataggttagtaaaagtaaaaaccaaggttgatcccgataatttctttagaaacgaacaaagcatcccacctcttcccctgcgtcatcattaattatcttaaatagatctatttctcttatcaaattattagtccttataacataaataatgttgggtttttgtgccttaactaaaactctattttaatg

SEQ ID NO: 134 - DNA, 1834 bp, Cannabis sp.
tatttagttaatttatttgcccctgctccaatatataaagctataaataggatagttcttaatccatagtaattcaaaattcattagaactaaagaaaaatgaagtactcaacattctccttttggtttgtttgcaagataatatttttctttttctcattcaatatccaaacttccattgctaatcctcgagaaaacttccttaaatgcttctcgcaatatattcccaataatgcaacaaatctaaaactcgtatacactcaaaacaacccattgtatatgtctgtcctaaattcgacaatacacaatcttagattcagctctgacacaaccccaaaaccacttgttatcgtcactccttcacatgtctctcatatccaaggcactattctatgctccaagaaagttggcttgcagattcgaactcgaagtggtggtcatgattctgagggcatgtcctacatatctcaagtcccatttgttatagtagacttgagaaacatgcgttcaatcaaaatagatgttcatagccaaactgcatgggttgaagccggagctacccttggagaagtttattattgggttaatgagaaaaatgagagtcttagtttggctgctgggtattgccctactgtttgcgcaggtggacactttggtggaggaggctatggaccattgatgagaagctatggcctcgcggctgataatatcattgatgcacacttagtcaacgttcatggaaaagtgctagatcgaaaatctatgggggaagatctcttttgggctttacgtggtggtggagcagaaagcttcggaatcattgtagcatggaaaattagactggttgctgtcccaaagtctactatgtttagtgttaaaaagatcatggagatacatgagcttgtcaagttagttaacaaatggcaaaatattgcttacaagtatgacaaagatttattactcatgactcacttcataactaggaacattacagataatcaagggaagaataagacagcaatacacacttacttctcttcagttttccttggtggagtggatagtctagtcgacttgatgaacaagagttttcctgagttgggtattaaaaaaacggattgcagacaattgagctggattgatactatcatcttctatagtggtgttgtaaattacgacactgataattttaacaaggaaattttgcttgatagatccgctgggcagaacggtgctttcaagattaagttagactacgttaagaaaccaattccagaatctgtatttgtccaaattttggaaaaattatatgaagaagatataggagctgggatgtatgcgttgtacccttacggtggtataatggatgagatttctgaatcagcaattccattccctcatcgagctggaatcttgtatgagttatggtacatatgtagctgggagaagcaagaagataacgaaaagcatctaaactggattagaaatatttataacttcatgactccttatgtgtcccaaaatccaagattggcatatctcaattatagagaccttgatataggaataaatgatcccaagaatccaaataattacacacaagcacgtatttggggtgagaagtattttggtaaaaattttgacaggctagtaaaagtgaaaaccctggttgatcccaataatttttttagaaacgaacaaagcatcccacctcttccacggcatcatcattaatgatcttaaatagatctttttctcttattaattagtccttataatatacatatattgataatatatataaaaaagtttgtccggatgtactgtgtatgct

SEQ ID NO: 135 - DNA, 1834 bp, Cannabis sp.
tatttagttaatttatttgcccctgctccaatatataaagctataaataggatagttcttaatccatagtaattcaaaattcattagaactaaagaaaaatgaagtgctcaacattctccttttggtttgtttgcaagataatatttttctttttctcattcaatatccaaacttccattgctaatcctcgagaaaacttccttaaatgcttctcgcaatatattcccaataatgcaacaaatctaaaactcgtatacactcaaaacaacccattgtatatgtctgtcctaaattcgacaatacacaatcttagattcacctctgacacaaccccaaaaccacttgttatcgtcactccttcacatgtctctcatatccaaggcactattctatgctccaagaaagttggcttgcagattcgaactcgaagtggtggtcatgattctgagggcatgtcctacatatctcaagtcccatttgttatagtagacttgagaaacatgcgttcaatcaaaatagatgttcatagccaaactgcatgggttgaagccggagctacccttggagaagtttattattgggttaatgagaaaaatgagaatcttagtttggcggctgggtattgccctactgtttgcgcaggtggacactttggtggaggaggctatggaccattgatgagaaactatggcctcgcggctgataatatcattgatgcacacttagtcaacgttcatggaaaagtgctagatcgaaaatctatgggggaagatctcttttgggctttacgtggtggtggagcagaaagcttcggaatcattgtagcatggaaaattagactggttgctgtcccaaagtctactatgtttagtgttaaaaagatcatggagatacatgagcttgtcaagttagttaacaaatggcaaaatattgcttacaagtatgacaaagatttattactcatgactcacttcataactaggaacattacagataatcaagggaagaataagacagcaatacacacttacttctcttcagttttccttggtggagtggatagtctagtcgacttgatgaacaagagttttcctgagttgggtattaaaaaaacggattgcagacaattgagctggattgatactatcatcttctatagtggtgttgtaaattacgacactgataattttaacaaggaaattttgcttgatagatccgctgggcagaacggtgctttcaagattaagttagactacgttaagaaaccaattccagaatctgtatttgtccaaattttggaaaaattatatgaagaagatataggagctgggatgtatgcgttgtacccttacggtggtataatggatgagatttcagaatcagcaattccattccctcatcgagctggaatcttgtatgagttatggtacatatgtagttgggagaagcaagaagataacgaaaagcatctaaactggattagaaatatttataacttcatgactccttatgtgtccaaaaatccaagattggcatatctcaattatagagaccttgatataggaataaatgatcccaagaatccaaataattacacacaagcacgtatttggggtgagaagtattttggtaaaaattttgacaggctagtaaaagtgaaaaccctggttgatcccaataacttttttagaaacgaacaaagcatcccacctcttccacggcatcgtcattaatgatcttaaatagatctttttctcttattaattagtccttataatatacatatattgattatatatataaaaatagtttgtccggatgtactgtgtatgc

SEQ ID NO: 136 - DNA, 525 bp, Cannabis sp.
caaaacaaatagggacaagccataaagatgacacaattaaaagccataaatgacatctaaactatcaaaaaattggtgcaaaaataaagctaatcaggaccaccgctttgagtttgaatttgcaagccaactttcttggagcatagaatagtgccttggatatgggagacatgtgaaggagtgacgataacaagtggttttggggttgtgtcaaaggtgaatctaagattgtgtattgtcgaatttaggacagacatatacaattggttgttttgagggtaagttttagacttgttacatcggtgggaatatattgcgagaagcatttaaggaagttttctcaaggattagcaattgaagtttagatattaaatgagagaaagaaaaatattatcttgcaaacaaaccaaaatgagaatgttgagtacttcatttttctttagttctaatatttttgaattactatgaatttagaactatcctatttatagctttatatattggagcaggggcaaataaattaat

SEQ ID NO: 137 - DNA, 1584 bp, Cannabis sp.
gcatacacagtacacccggacaaaatatttttatcataaaatcaatgtatgcatattataaggactaattaataagagaaaaagatctatttaagatcattaatgacgatgcggtggaagaggtgggatgctttgttcatttctaaaaaaattattgggatcaaccagggttttcacttttactaccctgtcaaaatttttaccaaaatacttctcaccccaaatacttgcttgtgtgtaattatttggactcttgggatcatttattccagtatcaaggtctctataattgagatatgccaatcttggattttaggacacataaggagtaatgaagctataaacatttcgaatccagtttagatgctttttcgttatcttcgtgcttctcccagctacatatgtaccataattcatacatgattccagctcaatgaggtaatggaattgctgattctgaaatctcatccattataccaccgtaagggtacaacgcatacatcccagctccttcatcttcttcatataatttttccaaaattttgacaaacgcagattctggaattggtttcttaacgtagtctaacttaatctttaaagaaccgttctgcccagctgatctatcaagcaaaatttccttattaaaattatcagtgccgtaatttacaacaccgctataaaagatgataatatcaatctagctcaattgtttgcaatctgtttttttaatacccaactcaggaaaactcttattcatcaagtcgactagactatccactccaccaaggaaaactgaagagaagtaagtgtgtattgttgtcttattcttcccatgattatttgtaatattcctagttatgaagtgagtcatgagtaataaatctttgtcatacttgtaagcaatattttgccatttgttaactcacttgacaagctcatgtatctccatgatctttttaacactaaacatagtagactttgttgggacagcaaccagtctaattttccatgctacaatgattccgaagctttctcctccaccaccacgtatagcccaaaagagatcttcccccatagattttcgatctagcacttttgcatcaacgttgactaagtgtgcatcaacgatattatcagccgcgaggccataattttgcatcaatggtccatatcctcctccaccaaagtgtccagctgcgctaacagtagggcaatacccagcagccaaactaagattctcatttttctcattaacccaataataaacttctccaagggtagctccggcttcaacccttgcgatttggctatgaacatctatgttgattgaatgcatgtttctcaagtctactataacaaatgggacttgagatatgtaggacatgtcttcagaatcatgaccaccgcttcgagttcgaatttgcaaaccaattttcttggacatagaatagtgccttggatatgagagacatgtgaaggagtgaatctaagattgtgtattgtcgaattttggacaggcatatacaattggttgttttgggtgtaagttttagatttgttacattggtgggaatatattgcgag

SEQ ID NO: 138 - DNA, 1832 bp, Cannabis sp.
tatttagttaatttatttgcccctgctccattataaaaagctataaataggatagttcttaattcatagtaattcaaaaattattagaactaaagaaaaatgaagtactcaacattctccttttggtttgtttgcaagataatatttttctttctctcattcaatatccaaacttcaattgctaatcctcgagaaaacttccttaaatgcttctcgcaatatattcccaccaatgtaacaaatctaaaacttacacccaaaacaaccaattgtatatgcctgtccaaaattcgacaatacacaatcttagattcacctctaacacaaccccaaaactacttgttatcgtcactccttcacatgtctctcatatccaaggcactattctatgtccaagaaaattggtttgcaaattcgaactcgaagcggtggtcatgattctgaagacatgtcctacatatctcaagtcccatttgttatagtagacttgagaaacatgcattcaatcaacatagatgttcatagccaaatcgcaagggttgaagccggagctacccttggagaagtttattattgggttaatgagaaaaatgagaatcttagtttggctgctgggtattgccctactgttagcgcagctggacactttggtggaggaggatatggaccattgatgcaaaattatggcctcgcggctgataatatcgttgatgcacacttagtcaacgttgatgcaaaagtgctagatcgaaaatctatggggaagatctcttttgggctatacgtggtggtggaggagaaagcttcggaatcattgtagcatggaaaattagactggttgctgtcccaacaaagtctactatgtttagtgttaaaaagatcatggagatacatgagcttgtcaagtgagttaacaaatggcaaaatattgcttacaagtatgacaaagatttattactcatgactcacttcataactaggaatattacaaataatcatgggaagaataagacaacaatacacacttacttctcttcagttttccttggtggagtggatagtctagtcgacttgatgaataagagttttcctgagttgggtattaaaaaaacagattgcaaacaattgagctagattgatattatcatcttttatagcggtgttgtaaattacggcactgataattttaataaggaaattttgcttgatagatcagctgggcagaacggttctttaaagattaagttagactacgttaagaaaccaattccagaatctgcgtttgtcaaaattttggaaaaattatatgaagaagatgaaggagctgggatgtatgcgttgtacccttacggtggtataatggatgagatttcagaatcagcaattccattccctcattgagctggaatcatgtatgaattatggtacatatgtagctgggagaagcacgaagataacgaaaaagcatctaaactggattcgaaatgtttatagcttcattactccttatgtgtcctaaaatccaagattggcatatctcaattatagagaccttgatactggaataaatgatcccaagagtccaaataattacacacaagaaagtatttggggtgagaagtattttggtaaaaattttgacagggtagtaaaagtgaaaaccctggttgatcccaataatttttttagaaatgaacaaagcatcccacctcttccaccgcatcgtcattaatgatcttaaatagatctttttctcttattaattagtccttataatatgcatacattgattttatgataaaaatattttgtccgggtgtactgtgtatgct

SEQ ID NO: 139 - DNA, 1048 bp, Cannabis sp.
tatttgcccctgctccaatatataaagctataaataggatagttcttaattcatagtaattcaaaaatcattagaactaaagaaaaatgaagtactaaacattctccttttggtttgtttgcaagataatattttttttctctcattcaatatccaaacttcaattactaatcctcgagaaaacttccttaaatgcttctcgcaatatattcccaccaatgtaacaaatctaaaacttacactcaaaacaaccaattgtatatgcctgcccaaaattcgacaatacacaatcttagattcacctctgacacaaccccaaaaccatttgttatcgtcactccttcacatgtctcccatatccaaggcactattctatgctctaagaaaattggtttgcaaattcgaactcgaagcggtggtcatgattctgaaggcatgtcctacatatctcaagtcccatttgttatagtagacttgagaaacatgcattcaatcaaaatagatgttcatagccaaactacatgggttgaagccggagctacccttggagaagtttatgattgggttaatgagaaaaatgagaatcttagtttgggtgctgggtattgccctactgtttgcgcagctggacactttggtggaggaggctatggaccattgatgtgaaattatggccttgcggctgataatatcgttgatgcacacttagtcaacattgatggaaaagtgctagatcgaaaaatatatgggagaagatctcttttgggctatacgttgtggtggaggagaaagcttcagaatcattgtagcatggaaaattagattggttgctgtcccaacaaagtctactatgtttagtgttaaaaagatcaaggagatacatgagcttgtgaagttagttaacaagtggcaaaacatttcttacaagtatgacaaagatttattacttgtaaagcccgcttagttaatttggaaattagcagttatttatgttaatcaggaaattatttatagctatttaaataatttatcattgttatttatggaa

SEQ ID NO: 140 - DNA, 1811 bp, Cannabis sp.
tatttagttaatttatttgcccctgctccattataaaaagctataaataggatagttcttaattcatagtaattcaaaaattattagaactaaagaaaaatgaagtactcaacattctccttttggtttgtttgcaagataatatttttctttctctcattcaatatccaaacttcaattgctaatcctcgagaaaacttccttaaatgcttctcgcaatatattcccaccaatgtaacaaatctaaaacttacacccaaaacaacattgtatatgcctgtccaaaattcgacaatacacaatcttagattcacctctaacacaaccccaaaactacttgttatcgtcactcttcacatgtctctcatatccaaggcactattctatgtccaagaaaattggtttgcaaattcgaactcgaagcggtggtcatgattctgaagacatgtcctacatatctcaagtcccatttgttatagtagacttgagaaacatgcattcaatcaaaagatgttcatagccaaatcgcaagggttgaagccggagctacccttggagaagtttattattgggttaatgagaaaaatgagatcttagtttggctgctggtattgccctactgttagcgcagctggacactttggtggaggaggatatgaccattgatgtgaaaattatggcctcgcggctgataatatcgttgatgcacacttagtcaacgttgatggaaaagtactagatcgaaaatctatgggacaagatctcttttgggctatacgtggtggtggagagaaagcttcgaatcattgtagcatggaaaattagactggttgctgtcccaacaaagtctactatgtttagtgttaaaaagatcatggagatacatgagcttgtgaagttagttaacaaatggcaaaatatttcttacaagtatgacaagatttattactcatgactcacttcataactaggaatattacaataatcatgggaagaataagacaacaatacacacttacttctctttagttttccttggtggagtggatagtctagtcgacttatgaataagagttttcctgagtttggtattaaaaaaatagattgcaaacaattgagctgattgatatatcatcttctatagcggtgttgtaaattacggcactgataattttaataaaatttcgcttgttagatcagctgggcagaacggtgctttcaagattaagttagactatgttaagaaaccaattccagaatctgcatttgtcaaaattttggaaaaattatatgaagaagataaggagttgggatgtatgcgttgtacccttacggttgtctaatggatgagatttcagaatcagcaattccattccctcatcgagttggaatcatgtatgaattatggtacatatgtagctgggagaagcacgaagataaagaaaagtatctaaactggattcgaaatgttgataacttcatgactccttatgtgtcctaaaatccaagattgacatatctcaattatagacatcttgatataggaataaatgatcccaagagtcaaataattacacagaagcatgtatttggggtgagaaatctttggtaaaaattttgacaggctagtaaaagtgaaaaccctggttgatttcaataattttttagaaatgaacaaagcatcccacctcttccaccgcatcgtcattaatgatcttaaatagatctttttctcttattaattagtccttataatatacatacattgattatatatataaaaatagtttgtttgtatgtactgtgtatgc

SEQ ID NO: 141 - DNA, 1831 bp, Cannabis sp.
catacacagtacatacaaacaaactatttttatatatataatcaatgtatgtatattataaggactaattaataagagaaaaagatctatttaagatcattaatgacgatgcggtggaagaggtgggatgctttgttcatttctaaaaagattattgaaatcaaccagggttttcacttttactagcctgtcaaaatttttaccaaagatttctcacccaaaatacatgcttctgtgtaattattttgactcttgggatcatttattcctatatcaagatgtctataattgagatatgtcaatcttggattttgggacacataaggagtcatgaagttatcaacatttcgaatccagtttagatacttttctttatcttcgtgcttctcccagctacatatgtaccataattcatacatgattccaactcgatgagggaatggaattgctgattctgaaatctcatccattagacaaccgtaagggtacaacgcatacatcccaactcctttatcttcttcatataatttttccaaaattttgacaaatgcagattctggaattggtttcttaacatagtctaacttaatcttgaaagcaccgttctgcccagctgatctaacaagcgaaatttggttattaaaattatcagtgccgtaatttacaacaccgctatagaagatgatagtatcaatccagctcaattgtttgcaatctatttttttaataccaaactcaggaaaactcttgttcattaagtcgactagactatcgactccaccaaggaaaactaaagagaagtaagtgtgtattgttgtcttattcttcccttgattatctgtaatattcctagttatgaagtgagtcatgagtaataaatctatgtcatacttgtaagaaatattttgccacttgttaactaacttcacaagctcatgtatctccttgatctttttaacactaaacatagtagactttgttgggacagcaaccagtctaattttccatgctacaatgattctgaagctttctcttccaccaccacgtatagcccaaaagagatcttgtcccatagattttcgatctagtacttttccatcaacgttgactaagtgtgcatcaacgatattatcatccgcgaggccataatttcacatcaatggtccatagcctcctccaccaaagtgtccagctgcgcaaatagtagggcaatacccagcacccaaactaagattctcatttttctcattaacccaataataaacttctccaatggtagctccggcttcaacccatgtagtttggctatgaacatctattttgattgaatgcatgtttctcaagtctactataacaaatgggacttgagatatgtgggacatgccttcagaatcatgaccaccgtttcgagtttgaatttgcaaaccaattttcttggacatagaatagtgccttggatatgggagacatgtgaaggagtgacgataacaagtggtttttgggttgtgttagaggtgaatctaagattgtgtattgtcgaattttggacaggcatatacaattggttgttttgagtgtaagttttagatttgttacattggtgggaatatattgcgagaagcatttaaggaagttttctcgaggattagcaattgaaggttggatattgaatgagagaaagaaaaatattatcttgcaaacaaaccaaaaggagaatgttgagtacttcatttttctttagttctaataatttttgaattactatgaattaagaactatcctatttatagctttatataatggagcaggggcaaataaattaactaaatat

SEQ ID NO: 142 - DNA, 8860 bp, Cannabis sp.
attactaactatatcactacatttttaattaatttgtaaaattaaaccaatattaattatttacacttaattaatttaactttgatgatgatgatcaggataaacaagcctgatctaccactagtttcaggggaaatgtcaattgaaacagcttggattttgagcataattgtggcactaactgggttgatagtaactataaaattgaaatctgcaccactttttgttttcatttacatttttggtatatttgctgggtttgcctattctgttccaccaattagatggaagcaatatccttttaacaattttctaattaccatatcggtaatttactattctttttcttttctattgtttaatataacttttgttattttctatttttaatattctttaaattttgacactgaaaattacaaaacttgtattgtgtctacagagtcatgtgggcttagctttcacatcatattctgcaaccacatcagctcttggtttaccatttgtgtggaggtaggtactctaaaattatattatagagattattattaaattttattttaataaaaattgaacacatattattattttgtattatttttataaaaaatttaccacataaatattttatgtttcagtttcatacattatatactatatttctttttttcttatacaaattaaaatttatattacgtttttattacagtcgttagtacaaaatttgttaagtgttgatttagttaagtaaaatgtcacatattatattagcgatcaacttcatttttattttaaaaaattattaaataatcttaaataaataacaataattattgaaatatcgagaaaaagaacaataaaaatatattttattatttatttagtatttataattaaatatataattatttagtttttttttcttcaatttttgaattatttaatcattttttattgaaagtagacaattaatttattggcgcacgttagtttagtcatatttaataagatttaacaaaattagaattaaaagctgcaataaaaacgtaacatatagtattaatcagtagaaaaaaaaataataataatattaaatttgtttgaaaaaaaaaatatgtggtatagaagtgtatgaaactaaaaagataagatatttataccgtaaatatcctttctcgaaaatacaaagtcttagccatttaataaaatagatgataagttcgataatttttgtaaaataaagaatacaaaataatttttattatatttaaattgttaggttccataattatttttctttgcacaattttgtattatagctattttgctagtatattatttagtagtaaattacttgtattattatttaaaattggaacatatattgatatatatatataagattttttttaatgtggagaattttgaaaatgtgcaatctgaatttattataaaatagatctcactatatttttggaatataaaaggggtacatggccactacaatgtagtgtagtgtaggaacttttattattatattgtgggtcccacttattcaatattgtttttttttttttaatttaaataatcctaaccaaataggtgggattatatattttctcctaaaattgaaaaaaataatcttaacttctattaatatctgtctgaaaatcaaatgcccaacatcaatccaaactaaaataaaattatcgtttaaattaatcataaaattttacatctatcaaattgtgaaaaattccaaatctacaaactcatctcacgtagcccaaccaccttcaacctcgaaaaccatcggccacctccatcacttatctcacacagcccaaacatgagagatctagtcatgagatcaccttgccatcgccattgagtccctgcctagttagatcgaaagtgtcatcacagtgagtacctataatcgccatcaagctcttatcgtcaaagactgtcaaaacaccgtcattttctaggtcgacgacgcctcttgagtgttggccttgcaaaagcccacgtctctgcaatcatgaaagaagaagaagacgaggcaaagaagaaacgatgagcagaatttttttttttaccccaattaatgcattattatatcagtggggtccatagtattgaataaaattaaataataaattaataaaaaggtaattataaaaaattggttagatgatacagtatatgatggacacgtaggatataaataacatttctcaattaaaatagaaaatgtcagaaaatagagttgaataaaaaaatattttaatcaatcttagtttgaatatgttgcattcaagatcacgatattacacttacccaattagaacaaactattaaataccatacaaataaggcatttagaaaattctccacggtaaaatgtcctatatatatacacttttgttttagtttaggtaattattgatcatctttggtacataggtagtcataattctagaaaaggaaaaaacatatatacagtagaacctctatttaagaatactctattcaagaataacttctaatttgttataaaaaaatcaaatctcaattcggaccagttataaataagaataacctctaaattgtaattagtatacattttttaagtcccgtttaacaaagtatacctctatataagaataattacatcataataaaatatatacatatatttgtaaatttatttatgtaaaattaataattttatttcaaattataatgcatgtatgaacattatatttactttaaaataattttaatataatatagtattaataattatttattgttattattattacattgattttttagttttttaattttttttttctattgtaactctatttagttataacctctcaattagaatataatttacttggtcccaagtgtatttttggatggaggttctactgtattaggattatattatatacatgttagttatttaaatatataaaaagttcatttaaatatattatatatatatataaaattatgaataatttatcgtaataaaaataaaaattaaataaaatatatttttgatatgtgtatataaaaagaaaaaattatcttatatactatttttaacgtttttttttcttttaaatttatagtttgggttgcttagtaatttctatctgggttactgtgtagatttcggtttcaatttaagttcctccgttagttgatatatgagtttcgattttctatatgaatttcgaaaaaatacaaaaaaaaaaaaaaagatgctttaaaatataaaaataaaaaaaactcctaactaaaaatttaacttaagaggaagcacatgttattttaaataatataatatgctaaaaatttattaaaagttgatataaatttgtaatttttataatgttaaatataatttaatgtaaaatataataataacatattaatcacaatagttaaagtgctaatataacttggggtctaatcctagctagaaggaagatcatttgtttttgaatttttttttttgaattttttgttatatactagtggagaaaacacgtgctatgcacgtgcattatataattaaaatagaagaaattatataaaaattaatttaataataatgcatttataaaatatgattcatgttatataaaaaaacttgggtgattttacaatgcacccccttaaaagggatgtactgatgcactcttaacttgtttcggcatccagaaaaattttttagtctaattttttttttcatattcatgtacgttatagctatttaagatattctacaaaattttgaaaaatttggaataatttacaatataggaaataatgttcaaacagtctattttacacgtgtataaaataaaatagtcacgcgtgcaacacactgtttgaacataattttcggtgtgttaaacttttctcaatttcttaaaattttgcaggatgtcttaaataactataacatacatgactatgagaaaaaatttgactaaaaatatttccgatgttaaaacagatagggtagcattaatatatccattttaaggaggtgcattgtagaattttccaaaaactttttattattctatgagaaaaaagacttaaatttttgtaaaaataatattaaattaaactaaattatttttctatatatatatattttgtaaaattatacctcacaataattattgtaaaaataattgaattatctattaattaagtaccacacacatattaattttttttagtaaaagctttacgaaattatgtaatttaattttagtaattattctcaaactaattttatattattatacttttaaatttttaaatactttgttaatgtaacaatgtacgtgtacgttagaaatatttctagattttttaaattatttttcatttttaaaaaagtacattacatcattttgaaaaatatttaataaattaaaacaaagataaattaatttaattaatttgttctattaatggagggtgccaaaaaaactactaaattggtgtaaaatttaatttgttagataaaaagaatatttactgacttaatttacaactttgaaactatatgtaaattacataatagtttaaatgtaatgttgtagactactaattaattttgctacaaattaattttttaaataaaaattaaattgcaaacttataaaaaacttaaagatttgaataatttaatatcttttattatcatagttaaaataatattccaaaatgatattgttcaacaaaaaaaatgaaaatggtaatagtaaaaatgtagctctctaatctatgccatggatcacaataactcatattagaaaaaactatcattattcatgtcattatataaaaagattttatggtaattaataagaacaccaatgatttttgtaatttattatagaaagccgaaaagagtattctcttttttatagttatagatagatatagatatataagtaaataaagtatattttaaaaatatatgttgtgatgaattaatatacaagtatatttctttttctgattttttcacttaatttttaagtgggtctgcctatacatacatgcatgttatcatcacgaaattatataaatacagttatatagatattcattgggcaagactatggtaggacttagtaaaagttccctaccagtagggaagctttttaaccattgattttagatcctgtgattattataatataaagtctatactcttacgatagaactgcttgtatacaattaaaacttcatatatattataataatatttattatatatttattttttaaaaaataatataaatataataaaaaatttattaattttatttgaattattatttttttttaaaaaataatttgaattattttatataaatatttattttcaaacatcactaatttatttacatatatagttctaccataattatcttttaaattaattcacttattaattttcttatcaagataatttttattaatcaaaccgagtcaatatattcacaagggaattcccattcaaaagagaaacttacaactctttatatttttaagaaaaattttatctatgttagactaggagtgttcatcaaattgctcaaaccgcccgcaccgcaaaaaaaatacggtttgaaattttttatggtgcagtcgcggtttgaatttttcctaaaccgtgcggtgtaatgcggtttgcagttttgaattgttaatttgcggttcaaaccgcaccacacattataaaaatactaattttatatttatttaggtctaatatgtgaatgtccaacccaaagcccactttatctcaaaaaaaaaaaaaaaaaaaaaaaaatcaaagtccactaattattgtattattgaaacttaattttttttttcatatttattttcaagccttatgatatttttgacaagtgttgctcaaactttgttgtatttgtgatagtttaattattggtgatagtccaaaccgcagaaactgtaaaaaccgcaccgcaccattttttgcggtgcgatttctgcagttttttagtttccgtactggtgcggtttgggaaattgaaaaaactgcatgtgcgggttggtttgaaaaaagctatacaccacccgtaccgcgaacatccctatgttaaataattttttttcatgtacaaaattaaatctacttctaatgcactttttaatgctactatctatacaaacttgaattcatacatttttcttatttatacataaattttaatttagccaagccataaattacacttgataatacattcttataaatataatatatatattttttctattttaaaatcatatgtatttttttaacatatattttttcaatcataaaaaaattaaaataacaaatctaattaaaataaagtagaaaaaaaatcatttaatttaatgtatatataaaggacatatataaaataaccgtgtctttttattattggaccaactttctactaccttttttcattataaatattggctattatgaatacaacataatttaagtacattttatttcttttacttttaattggtttaaataatgttctcatggcatgaggaagaatgggccggccctacattagaacttccctatattcatataccaaaaatatataaggaatgcacaattaaaattttctccaagagttatttcggtagactctttatttaattagtatttgagagtgttttagtttttttttttttttttttcataattacgtacgttgtaactatttatgatgacttataaattttcagaaaattctaaataatataacatcaaaaataatatatgttcaaacaattacttgccacgcatataagtaaaaataattacgcatgtaataaaatatttgaatcttatttttagtattgtaaactatttcaaattttttaaaaatttacaagtgatactatctcgaatgccaaaataaataaaaaatctacttatcagcgaccctttaattaagggatgtactatagacttacactcaggaccggccctataggcataggcgggctaggcccgtgcttaggacccacatctttcggggcccaaaataaaaaataataaaaaaattattaaacttttatttaagtaaaattaagtgtattgtaaataatgtcatattatacaatgtcatgggttcgaatcccgggccctgcttacactataccatttccctctattcataatttaatagtagtttgtttgaattttaatttgagtttcaggcctgcttttagtttcatcatagcattcatgacagttatgggtatgactattgcttttgccaaagatatttcagatattgaaggcgacgccaagtatgttatcatcctaacctatttaataatcactggaaatttaaaagataattatgatattttttcagtgtaaatcgtaaaagaaaatagtgatgaccttatcgttcacacaattttaattaaataccataaattaacaataataattatgttaatttgtagatatggggtatcaactgttgcaaccaaattaggtgctaggaacatgacatttgttgtttctggagttcttcttctaaactacttggtttctatatctattgggataatttggcctcaggtatgaatttaaatatcattatttgatactattatgtatattgaaatgaagtatttgcgccataaataaagtttaatttacgattgtaaataaatacttaaatttaatttttgacggcagtaatacttaagttatatttttaaaactttgtaggtacttcgttattaaatatattaagtaaattgtcacgtgacaatttcagattgatcgaagatgaatttttattttttttttaagaaaataatttatatgtacaataagaaaataacaggtataatgacttgacatttaacgttcagtacttacacagttttacaaatataacttagatatcattaccgtcaaaaattaaacttaagtatttatttacaactaaaaattaaacttaaatattaatgtcccaaattactcaatagaaatttcatatataccagtctcatatacaaataatttaaaataaagcatatagatatgatacatatgataatattaaatgcataatttaatgcactaataatatatatatatataaaatagaaccattgggtgatgtagtatataagcttctcaatcttaatctaataattaatatagtgactatgctggggtgaccacaagagcattccataacagaacaaaatcatcagtgcgttcatatttcttattttcaggttttcaagagtaacataatgatactttctcatgcaatcttagcattttgcttaatcttccaggtttgccaccacaattaaattctatttcctttctctaaaagaaaataagagaaaaatgttatattatatatatatatattattaaacaaaattatacctaaatatcgattttaatttgtttaattaattttgtacagactcgtgagcttgctctagcaaattacgcctcggtaatatattctgaataaacacttgtcttattattattattaatttagaaaaaaaacagtaattttctgataatattgaatatggatgcaggcgccaagcagacaattcttcgagtttatctggttgctatattatgctgaatactttgtatatgtatttatataagaccataatataacatatatatgtttattacataaaattgggacacaaaaacgtcaattatttggacaaaagtactcagaaagacctctttcactacaag

SEQ ID NO: 143 - DNA, 14704 bp, Cannabis sp.
caaataattgacgtttttgtgtcccaattttatgtaataaacatatatatgttatattatggtcttatataaatacatatacaaagtattcagcataatatagcaaccagataaactcgaagaattgtctgcttggcgcctgcatccatattcaatattatcagaaaattactgttttttttctaaattaataataataataataagacaagtgtttattcagaatatattaccgaggcgtaatttgctagagcaagctcacgagtctgtacaaaattaattaaacaaattaaaatcgatatttaggtataattttgtttaataatatatatatatatataatataacatttttctcttattttcttttagagaaaggaaatagaatttaattgtggtggcaaacctggaagattaagcaaaatgctaagattgcatgagaaagtatcattatgttactcttgaaaacctgaaatataagaaatatgaacacactgatgattttgttctgttatggaatgctcttgtggtcaccccagcatagtcactatatataattattagattaagattgagaagcttatatatactacatcacccaatggttctattttatatatatatatatatatatatatatatatatagtgcattaaattatgcatttaatattatcatatgtatcatatctatatgctttattttaaattatttgtatatgagactggtatatatgaaatttctattgagtaatttgggacattaatatttaagtttaatttttagttgtaaataaatacttaagtttaatttttgacggtaataatatctaagttatatttgtaaaactgtgtaagtactgaacgttaaatgtcaagtcattatacctgttattttcttattgtacatataaattattttcttaaaaaaaaaaataaaaattcatcttcgatcaatctgaaattgtcacgtgacaatttacttaatatatttaataacgaagtacctacaaagttttaaaaatataacttaagtattactgccgtcaaaaattaaatttaagtatttatttacaatcgtaaattaaactttatttatggcgcaaaatacttcatttcaatatacataatagtatcaaataatgatatttaaattcatacctgaggccaaattatcccaatagatatagaaaccaagtagtttagaagaagaactccagaaacaacaaatgtcatgttcctagcacctaatttggttgcaacagttgataccccatatctacaaattaacataattattattgttaatttatgatatttaattaaaattgtgtgaacgataaggtcatcactattttcttttacgatttacactgaaaaaatatcataattatcttttaagaaaactaaaatattaacttgatcagataattttcagtgattattaaataggttaggatgataacatacttggcgtcgccttcaatatctgaaatatctttggcaaaagcaatagtcatacccataactgtcatgaatgctatgatgaaactaaaagcaggcctgaaactcaaattaaaattcaaacaaactactattaaattatgaatagagggaaatggtatagtgtaagcagggcccgggattcgaacccatgacattgtataatatgacattatttacaatacacttaattttacttaaataaaagtttaataattttttattatttttattttgggccctgaaagatgtgggtcctaagcacgggcctagcccgcctatgcctatagggccggccctgagtgtaagtctatagtacatcccttaattaaagggtcgctgataagtagattttttatttattttggcattcgagatagtatcacttgtaaatttttaaaaaaatttgaaatagtttacaatactaaaaataagattcaaatattttattacatgcgtaattatttttacttatatgcgtggcaagtaattgtttgaacatatattatttttgatgttatattatttagaattttctgaaaatttataagtcatcataaatagttacaacgtacgtaattatgaaaaaaaaaaaaaaaactaaaacactctcaaatactaaattaaataaagagtctaccgaaataactcttggagaaaattttaattgtgcattccttatatatttttggtatatgaatatagggaagttctaatgtagggccggcccattcttcctcatgccatgagaacattatttaaaccaattaaaagtaaaagaaataaaatgtacttaaattatgttgtattcataatagccaatatttataatgaaaaaaggtagtagaaagttggtccaataataaaaagacacggttattttatatatgtcctttatatatacattaaattaaatgatttttttctactttattttaattagatttgttattttaatttttttattattgaaaaaaatatatgttaaaaaaaatacatatgattttaaaaatagaaaaaaatatatattatatttataagaatgtattatcaagtgtaatttatggcttggctaaattaaaatttatgtataaataagaaaaatgtatgaattcaagtttgtatagatattagcattaaaaagtgcatcagaagtagatttaattttgtacatgaaaaaaaattatttaacatagggatgttcgcggtacgggtggtgtaatttttagcttttttcaaaccaacccgcacatgcagttttttcaatttcccaaaccgcaccagtacggaaactaaaaaactgcagaaatcgcaccgcaaaaaatggtacggtgcggtttttacagtttttgcggtttggactatcaccaataattaaactatcacaaatacaacaaagtttgagcaacacttgtcaaaaatatcataaggcttgaaaataaatatgaaaaaaaaaattaagtttcaataatacaataattagtggactttggatttttttttttttttttttttttgagataaagtgggctttgggttggacattcacatattagacctaaataaatataaaaattagtatttttataatgtgtggtgcggtttgaaccgcaaattaacaattcaaaactgcaaaccgcattacaccgcgcggtttaggaaaaattcaaaccgcgactgcaccataaaaaatttcaaaccgtattttttttgcggtgcgggcggtttgagcaatttgatgaacactcctagtctaacatagataaaatttttcttaaaaatataaaagagttgtaagtttctcttttgaatgggaattcccttgtgaatataattgactcggtttgattaataaaaattatcttgataagaaaaattaataaagtgaattaatttaaaagataattatggtagaactatatatgtaaataaattagtgatgttttgaaaataaatatttatataaaaataattcaaattatttttttaaaaaaaataataattcaaaataaaaattaataaattttttattattaatattattttttaaaaaataaatatataataaatattattataatatatatgaagttttaattgtatacaagcagttctatcgtaagagtatagactttatattataataatcacaggatctaaaatcaatggttaaaaaagcttccctactggtagggaacttttactaagtcctaccatagtcttgccctatgaatatctatataactgtatttatatacatttcgtgatgataacatgcatgtatgtataggcagacccacttaaaaattaagtgaaaaaatcaggaaaagaaatatacttgtatattaattcatcacaacatatatttttaaaatatactttatttacttatatatctatatctatctataactatataaaaagagagaatactcttttcggctttctataataaattacaaaaatatcattggtgttcttattaattaccataaaatcttttttatataatgacatgaataatgatagtttttctaatatgagttattgtgatccatggcatagattagagagctacatttttactattaccattttcaattttttttgttgaacaatatcattttggaatattattttaactatgataataaaaacatgatattaaattattcaaatctttaagttttttataagttatgcaatttaatttttatttaaaaaattaatttgtagcaaaattaattagtagtctacaacattacatttaaactattatgtaatttacatatagtttcaaagttgtaattaagtcagtaaatattctttttatctaacaaattaaattttacaccaatttagtagtttttaggcaccctccattaatagaacaaattaattaaattaatttatctttgttttaatttattaaatatttttcaaaatgatgtaatgtacttttttaaaaatgaaaaataatttaaaaaatctagaaatattacttacgtacacgtacattgttacattaacaaagtatttaaaaatttaaaagtataataatataaaattagtttgagaataattactaaaattaaattacataatttcgtaaagcttttattaaaaaaaattaatatgtgtgtggtacttaattaatagataattcaattatttttacaataattattgtgaggtataattttacaaaatatatatatatagaaaaataatttagtttaatttaatattatttttacaaaaatttaagtcttttttctcatagaataataaaaagtttttggaaaattctacaatgcacctccttaaaatggatatattaatgctaccctatctgttttaacatcggaaatattttagtcaaattttttctcatagtcatgtatgttatagttatttaagacatcctgcaaaattttaagaaatgagaaaagtttaacacaccgaaaattatgttcaaacagtgtgttgcacgcgtgactattttattttatacacgtgtaaaatagactgtttgaacattatttcctatattgtaaattattccaaatttttcaaaattttgtagaatatcttaattagctataacgtacatgaatatgaaaaaaaaaattagactaaaaaattttctggatgccgaaacaagttaagagtgcatcagtacatcccttttaagggggtgcattgtaaaatcacccaaagttttttatataacatgaatcatattttataaatgcattattattaaattaattttatataatttattctattttaattatataatgcacgtgcatagcacgtgttttctccagtagtatataacaaaaaattcaaaaaaaaaaaaaaattcaaaaacaaatgatcttccttctagctaggattagaccccaagttatattagcactttaactattgtgattaaatatgttattattatattttacattaaattatatttaacattataaaaattacaaatttatatcaacttttaataaatttttagcatattatattatttaaaaataacatgtgcttcctcttaagttaaattttcagttaggagtttttttatttttatattttaaagcatcttttttttttttttgtatttttacgaaaattcatatagaaaatcgaaactcatatatcaactaacggaggaacttaaattgaaaccgaaatctacacagtaacccagatagaaattactaagcaacccaaactataaatttaaaagagaaaaaaaaaacgttaaaaatagtatataagataattttttctttttatatacacatatcaaaaatatattttatttaatttttatttttattacgataaattattcataattttatatatatatatatatttaaatgaactttttatatattttaaataactaacatgtatataatataatcctaatacagtagaacctccatccaaaaatacacttgggaccaagtaaattatattctaattgagaggttataactaaatagagttacaatagaaaaaaaaaattaaaaaactaaaaaatatcaatgtaataataataacaataaataattcaaactaagattgattaaaatatttttttattcaactctattttctgacattttctattttaattgagaaatgttatttatatcctacgtgtccatcatatactgtatcatctaaccaattttttataattacttttttattaatttattatttaattttattcaatactatggaccccactgatataataatgcattaattggggtaaaaaaaaaaaattctgctcatcgtttcttctttgcctcgtcttcttcttctttcatgattgcagagacgtgggcttttgcaaggccaacactcaagaggcgtcgtcgacctagaaaatgacggtgttttgacagtctttgacgataagagcttgatggcgattataggtactcactgtgatgacactttcgatctaactaggcagggactcaatggcgatggcaaggtgatctcatgactagatctctcatgtttgggctgtgtgagataagtgatggaggtggccgatggttttcgaggttgaaggtggttgggctacgtgagatgagtttgtagatttggaatttttcacaatttgatagatgtaaaattttatgattaatttaaacgataatgttattttagtttggattgatgttgggcatttgattttcagacagatattaatagatgagttaagattattttttttcaattttaggagaaaatatataatcccacctatttggttaggattatttaaattaaaaaaaaaaaaaacaaaatattgaataagtgggacccacgatataaataaataaaagttcctacactacactacattgtagtggccatgtaccccttttatattccaaaaatatagtgagatctattttataataaattcaggttgcacattttcaaaattctccacattaaaaaaaatcttatatatatatatcaatatatgttccaattttaaataataatatacaagtaatttactactaataataatatactagcaaaatagctataatacaaaattgtgcaaagaaaaataattatggaaacctaaacaatttaaatataataaaaattattttgtattctttattttacaaaaattatcgaacttatcatctattttattaaatggctaagactttgtattttcgagaaaggatatttacggtataaatatcttatctttttagtttcatacacttctataccacatatttttttttttcaacaaatttaatattatatattatttttttctactgattaaatactatatgttacgtttttattgcagcttttaattctaattttgttaaatcttattaaatatgactaaactaacgtgcgccaataaattaattgtctactttcaataaaaaatgattaaataattcaaaaattgaagaaaaaaaaaactaaatgattatatttaattataaatactaaataaataaataaaaatatatttttattgttctttttctcgatatttcaataattattgttatttattttaagattatttaataattttttaaaaataaaaatgaagttgatcgctaatataatatgtgccattttacttaactaaatcaacacttaacaaattttgtagtaacgactgtaataaaaacgtaatatataatatttaatttgtataagaaaaaaagaaatatagtatatatatgtatgaaactgaaaacataaaatatttatgtggtaaattttttaaaaaaataatacaaaataataatatgtgttcaatttttattaaaataaaatttaataataatctctataaatataattttagagtacctacctccacacaaatggtaaaccaagagctgatgtggttgcagaatatgatgtgaaagctaagcccaaatgactctgtagacacaatacaagttttgtaattttcagtgtcaaaatttaaagaatattaaaaatagaaaataacaaaagttatattaaacaacagaaaagaaaaagaatagtaaaataccgatatggtaattagaaaattggtaaaaggatattgcttccatctaattggtggaacagaataggcaaacccagcaaatataccaaaaatgtaaatgaaaacaaaaagtggtgcagatttcaattttatagttactatcaacccagttagtgccacaattatgctcaaaatccaagctgtttcaattgacatttcccctgaaactagtggtagatcaggcttgtttatcctgatcatcatcatcaaagttaaattaattaagtgtaaataattaatattggtttaattttacaaattaattaaaaatgtagtgatatagttagtaattgtacctgtcgatgtccacatcgtaaatttgattcatgattgctgcaaagaaattaaaggacaatataggcaccaaagcaaagaatgccttccacatcaaaccccaactgaataaatgtctgttattgaacaactctctcccaaacaaaccactgctcaccaacaaacaaaaaccattatttaatttgttaaatgataattcaaattttatattttttaatatagtccaaagtagactcttgagattaataataacatgttttggaggtgttataataagattgattatatttttttgtatttatttgtagtagaaactagttttaggttggttatattaaaaaaaattaacaaaaaattgagttcaatgtctatttatatagagatattggtggctaaactacttaaattttaaattttttaacacttaccaaaaaaattaaaatttttacggcaaaacctactgaacccctatttcgtttcactctttacacttctgttaaaaaacctcagttaagtgccacagtggcatgcctacgtgtacgcttggcaaatttttagtggtctacacaatatttattattaaaaaataatttaaaataattaaaaaatttaaatataaaaaaaataattatataaaaatatattttattttattttatgtttcttttttctttttccttttttcttcttctggagagaacaaaaaaaaaaccctacatcttcttatccatcccgactgcctcccctatctcattttcccttcttttttttttttttttttttttttctgtgttattcatctcttatcatcatcaccaccacaaaaccactattaccatcaccaccacaaaaccaccattaccaccatcgccactgttttttaaatcaaagaaaaataaaaattaaattagggcaaacattaatggttggggcagatcaagagagagaagtgacgtggagcttcggctccggcgaccaccacgaagagagagagagagagagagagagagagagagagagagagagagagagagagagagagagagagagagagagagagagagagagagagagagagagagagagagagagaaagagatggtctgggaaggagaagatcgagagagagagagagagagagagagagagagagagagagagagagagagagagagagagagagagagagagagagaaagagagggaaaatggctctggcgagagcctaggtgcttcagtgagggcctgggtgcttcggctccagcgaggtccagacgagagagagagagagagagagagagagagagagagagagagagagagagagagagagagagagagagagagagagagagagagagagagagagagagagagagagagagagcgagagagagggcctgggagggagggctgagagattagggtttcagaaagtttaagaaataaataagaagaaagaagaaagaataagaaaaagaaaaagaaaaaaaaataaaattatttttttttctgattttttaattttttaaatatttataattattttttaaaattaatattaagtagaccaataaaatttgacacgtgtatgtatgtgtacacgtgggctcgtccacgtaacacttaactaagattttttgacagaagtggaaaaagcaaaatggaatgggggttcagtaggttttgctgtcgaaatttcaatttttgtggttaagtgtcaacaattttaaaatttagatggtttagcgccaatatccctttatatatataatagatgatagatgatagtatgtatgttatatttttttaagacaacatgtaaagtttttaaagaaataatttataatatagaaaatagtgttcaaacattttatttcacacatataaaatatgagacactgtaacagaccgcttgaaccttatttttagtccgttaaattaatcagttttttgtttttaaaattagaaaaataaaaatatttttcaaaatcatgttctttaaaactgtttttacttttcaatttttctaattcaaaatcacatttttcaaaactaaaaaatcactttcaatttttttaaacagtttttttatcaatattttggactcccaccccaacctagacattgaaactcggacctggacctcgacccagaccctaacctagacccaaaccccgaccctggactcgacttaaataaaatcaacaaataaaaataaaaaatagaattttagaatacacttttattttttgtttttaaaattgaaaaacaaaagtagttagaacacttttttatttttcaaaactaaaaatttacttttatttttgtgattaaaattttttttaaaaaaaatgttatcaaatactaccataattattcaaatattgaaaatagaaatgtggtgcatcgccacacctatttttgggatataccataaaagcactttttattttttattgattaaggagacgtttggtaacacttatttttaaaaaaatttaatcacaaaaataaaagtaaaatttttgtttttaaattttatttttgaaaaataaaaatgtgttctataactacttttgttttttaattttaaaaataaaaaacaaaaatgtgttatgtaaatttcattttcattttcatttttatctattgattttatttaagtcgggtccaacgagatcgggaccgggggcaggtccaagtttggggttaggtccaggttcagtttctaatgtctaagttagagtcagaatctaaaatattgattaaaaaaactgtttaaaaatttaaaaatatatattttttaatttttaaaatttagattctgaattaaaaaaaattaaaaagtaaaaacagtttttatacaacatgattttagaaaataattttactttttaattttgaaaataaaaaactaattaaaaaaatattaccaaacgcaccctaaataaatagttttttcagtaaaaagttacattagtcctaagacccttgaatcaaaagagctcaatcttctgagaatttttatttttagtttttctgaatatgattgtttaccatctaattacttctctaagggcccgtttggtacgcaggactggattggattagacagattaatttgtctaatccagtgtttgggcatgttagaagtctggataactaatccagctaaccttatctgtttgggattatttatcccaccttgctgagtgggataaataatcccatgcaagtgaaattttttttatcgtttttttaattttaattttacttttattaatatattttaaatttaataagaatttaaaggaaataattatcacacatttatttatacatttttttcttatcaaaaacttattcattaaaattagtaaaaatgtataattttgaattattatacataagttttcaaaagttaaaatattattaattaaccaatagttacttaaattgattctagaaaaataacatgacaataaaattatatattatttttaaattactagaaaatttatataaatattttaaaaaaattaatatttataataaattattgtttaagataaacaattttatattatttaagtatttttattttactattttaattatttattaaataaaaaatatgataaaatatttcattatatatttatgatatatacttaattgatatattattttattttatttctattttttgttacgaattattcatttttatttatttattattatatattttaatttaatttattattatatatttttattttaatttaagttttttttttctaaaaggaaataaataaaatagtccagtctattcttaaaccaaacataggattactttcagcataatccaatcttgtccagtccagtccaatcctgcgtaccaaacgggccctaaacgttttttttttttaaattattattttatttattccatctctttctaaattaattatttttaatattccttgtcttcttttttttattattttaattactaaaaatacaatttttaaatgatttaataaaaaatatatatataaaaatagtgcatgatgtaatgtaaaagttagagttaacaaaaaaagtgctaaagggcatcagtattggtgtttagcactacctaaagtattatattgctattagtataattaagtattgatcccacacaatttaatttaataattattatggaatatggctattaatttgcaagacaatacttcaaggtagtactaggcaccactgatatttgataacaatgtctttaataaaataaaaaatataggtgacgtttggtaacacttttttaataagtttttagtttttaaaattagaaaagtgaaaatatttttcaaaatcatgttctataaaattgttttcacttttcatttttaattgagactcaaaattttgaaaacaaaaaaaaattacttttaatattttcttaaacaattttttttcttaatcaatatttatgactctgactagacccaaaccgaaccgaaccccgaccccatccctggcactaaacctaactcctaacccggactcagattcgactctagacctagacccgacttaaataaaatcaaaaaataaatataaaaatgaattttacagaacacgcttttgttttctattttttaaattgaaaaacaaaagtggttatagaacagatttttgtttttcaaaaataaaattttcaaaagcaaaaattttacttttatttttgtgatttaaaaattaaaaaaataaaaatattaccaaacgatactataatattttagtaaaatattttaaacagtaaagtttcaatctattgggagttactatacatagcttaacaagttggtccccaactttgttttcacttaaaaagttatcctccaactatgatttcttgccagcttaacgagtattattaaaccccaacaaaaaattaaaatttgaggactaatttgctgaaaaaaaaaaaaaaaagtagggaaccaatttctcaattatactaattaaacttttaatatattagaaggctcttttccattttgttgtaaggagtatattttttggtccctctatctttgatttgcttgacaccaatatttttttaaaatatatatatatatatatatatatatgcaacactttttaatgggtattacccatttactaaacaaatttaactataaatattaattttaaaaatatcaaactatcgaattttgatctaataatgaataatgaaatcacaaatttgaatttctatgcttaattgaactacctaatcaaaaaaatgtcaaaaaatatctctttttactctaaatcaaaaatatgttcatataaaaatatttaactcaaactcaacttttttttttcttgctaaaaaactttttttaattttttttttttttacagatggaacaatctcagtccatatgatataaaaatgagagatttttttttaattagatagaaaaattaagcataaaaactcaaaattttttaattttacctatttatggataatacccaagtgcacccatatatataatacaaattaccacaatatatttttggactaatattatgaacatattgaaaaaatcattctatataaaatgagttacttaccaagcgattgaaatcatcccttttactacatatggtctttgaagtttccaacaagtatgtccaaaatttaaaattttagttgctattgaattatcagattcatgatgaggagaaccttcaatttgatcgctacctgcctgttaattaacaaagtattattattattattattattattattattattgttatttttttttcatattttccgtagttgtaaattaataacacaattctataattataattgagataatataaatataatatatatatatggaacacttcttaatggctattacgtacccatgaatagttactcagcaaatttaattataaatattaattttaaaaatatcaacaaattttgatctaataacgaataatgaaatcacaaatttaaattttatatatatatatatatatatatatatatatattatacacacatacttaccctaatggaccttgattgtgagcttattctgttgtgtgaattgagtccaagtaaatggaagttcttggttaagcaatatttagagggaaaattatcataagaggatttaattattggtgttttggggtgttgataagataataatgagtttttgggattctta

SEQ ID NO: 144 - DNA, 4954 bp, Cannabis sp.
ataactatgtaaagatttgctactaagttatatcaataacaataaattttatttataatgtgttgagagtaagtgtgttttataataacaaggctctaaatgaaaacatatactaaatattcagcataatagagcttccacatgaactcgtagaattttctgcctgcttcctgcattgtacaaccaatatatataaataatcaaatgtatgattaattagaaaattatattattttttatataataataataataataataataataataataataataataataattaccgggttgtaatttgttagagcaaactctcgagtctgtacgcaattaaacaattaaaaatatttataaatatgtgaaaaaaattattataataatatatttgctcttaatttcttttgtgagaatttaaatggcaaacctgaaaaattaaccaaaatgctaaggttgcatgtgaaagtaacattacgttactcttgaaagcctgtaattaaataagaaatgatgaaaagacaattaacattaataaataaaatacttgaattattttagaaataataataaattaatcaagaattgaatggatgaatcttatgagtattatttcgggtgtgactcatatggtaaaaataatatgatatgaatttaaattttatctaattaaattagaatatgtattaaaatgtaattttaaattatacaaataataattaatggcatgtgtgttagacaatattttagtacctcataatgtataattaataaaatacctgtggccaaataatggcagcaagtatagcagatacataggttagaagaacaattccagaacaaagaaatgttatgtttttagcaccatatctggttgccaaggttgatatgccatgcctatatagaaataagataataagtaatattattaagtgtttgtttaaaaaaaaatgataataaaatatttataatgataattttaaataaaataactaattaaactaattaaggttggcataagaatttaacatacttggagtcgccctcaatgtctgaaacatctttacataaaaaaaagctgatcacattgatttaacaaaggctaggatgaaagtaaaaggaggactgaaactcaaattcaaattcaaacacatgatgagatgttataatatatcaaattttgataagaatcgttcagcaagaaaaaaaaaaaacaaaaagtcgaattatcccaatgaagaaataattaaaaatcattttacatgatatacctcattaatttaaattggcaacatttttttaattaactttttatttttctagaaaaatgaaaatactttttaaaaatatcttttataaaattgttttcacttttcaattttttaattaagaattaaacttttaaaaattttgaaaacaaaacaaaaaaaataatcactttaaccattttttaaatgatttttttttcttaatcagtattttggtcgactttgaccccaacttagaccttggtacccaaaatccggccctagccccagtcgtggactcggaccacaaccccgacctcagacacagacttgaattcgacttaaataaaattaaaaataaaaaaaaattaaattaaaaaattaaaaaataacaatggttatagagaagtacatttctatttttttaaaaaaaaaaattaaaaacacaaattttacttttatttttatgattaaaaaattaaaaaaaaacaaaaagtattaccaaacgttcccttaattgctaaaatttaaagtgatcattggaataattttagttagtctagaatttgattaatttctcattttccatgatttttattttttaaacaaaagtacatgatttttcttttattttaaccttttttatttatttcaaaacaaaatctttcatatattctcaatatttaattaatacactatgatgacttttttttttctttcaaaaattatgagaaaagcaataaaaattagacttaacaaattaattacatcgatagttgtctgaatatttttggagtacaaatattgtaatcaaaatgatggtagtatttatttttctattttctttagttttttttttttgtttaattactaacaaatatattgatatgtgtaatttttattggtattaatttgtggtagtacccacctcatctcaaatggtaggccaaaagctgctctgctagcataataacatgtgaaatttacgatcaccagaccctgcacagtgttatatattttaataaataattacctcatattaaattgatttcttttgaaaaaattaattaattaattagtaatagaaaaattatcaaaagttacagttaaagataagaagtagtaaacgtgcactaaaatactacttttaataacgtagcagtgttgctataatattttgtgtaacattcattaattactcatagtaaagtaaacagtaatgatatatatataaaattataaaatatgctcagccttaatataaaagtgatatttttttctatatatattatttgtgtgcatatatcattacttataataaaataaattaccataaaataactggaaaatgcggtattaggattttgcttccatctaaaaggtggaacagaatagagagctccaaccaaaatactaacacaatacagagaaataaagagtggtccacagttcaattttatagttagtatcaacccagttagggccacaattatgctcataatccaagctgtttcaattgacatttcccctgaagctagtggtagatcaggcttgtttatcctgataatgaaaattatattaattaagtgtaattatcaatattagtttaattttacaaaattaaaaatgtagtgataattgtacctgtcgatgtccaaatcggtaatctgattaatgatattagtacacaaattaacgctcaaaataaccatcaaagaagagaatgccttcaacatcagagaccaactcaataaatttgtgttatgaaacaactctctcccaaacaaaccactgttctccaataacaaaacaaaattaatacatcaattccaatcaagttggtgcacatatatacacttgatacacatattacaaaaaatcttattttaattactacaaaattttaacttaaaaataaaaatatggtggactaaatatgttagcattttattatgaataagagtgatgtttagtttcataaaatctaaattgtgactaaaagtcatcattaattataaaggatataggtttttttttagtgacacatgattcatgaataaaggaaattttcgctcaaattataaaggagtttttacatttcatattgaaatttttaatttttatacttttttattgtagggtaaatttttttcaaaaatactgttttttttttttcgaaaataccgtgtaagttttatactgtgtagtgtgtactgtgttaagtttttactgttgtttcacggttatttttagttttttcactgttgttttaattattctgttttgttgttttgcgattgttcaataaaaagacattatttttataaaagaatttcatgttataataaaattataaatttttacccaaaatttaatatttttctaaaaacttctaatttttgttagaatgtgtccctttttcctattgattcttgaatgtgatcaaattatagatcggttatttttttttttctataagattgtctacattaaagttatagtagagtacatccaataggttttgaaaaaattaattatgaataatttacaatattcaaaactaaactccaaatagtaaatttaaatgcacctacctaaaaataaaaaataaaaaataaaaatgtgtaattatccgtttgaattctgtttttgacaatataaattattcaaaaatattcaaaatttgataaaatatttaatataattacaatatatattggcaacttctgttattagtttaggggattatatttagaaaaatgcaatataatgtgttagattataattgtagtattttttaaaagtgttatactattagaatgtttttttttttttttaaaaaaaaaagtgttaaaaataatgaaaaaaatataaaataaaatattatatttgagatttttaatatttttaaaagatatgctacctatagtgatgcttatgcccctctccggattcttcctaatcctagctagttacacacatagggtaacccaattagttacaagttacaaatactttttttccctaaaattttcctaacatttggagtaagtacaaaataataattattaggaaaaaaaaacatttttaaaaagaaaatgtttatatatataattatacaaatgaccatatttggaattaaaattaagagcatattgaaaataatgagtacttaccaagcgcacgagataactcctatgaatgtatacggtctttgaagtttccaacatgtgtgcccgaagtttaaaattttagttactactgaatatttagtattagattcaggaggctcagtttgatttgcagtatctgtctattaaatgttaacacaatattatttttcttaattgtaaaataaaaaactcaattctatcttatgtataatttaagaagaaagaaagaaattcccatataaatatatatctacaagcaagaaacccacacataccctaatggaattttttgcaattaataatgagtttgagcatctgttttgtagatgaaagttcttgttggagcaatagttagagggaaaattattataagaggatgtaattattggtgttttggggtgttgatgagataataatgagctcttgggattcttattatgagggtttaataaagtatggtaattagtttgaaatgaaaagttacaaactgatgagagctccatgaggattattgttgattaaaaaggacaagaggga

SEQ ID NO: 145 - DNA, 5008 bp, Cannabis sp.
ccctcttgtcctttttaatcaacaataatcctcatggagctctcatcaatttgtaacttttcatttcaaactaattaccatactttattaaaccctcataataagaatcccaagagctcattattatctcatcaacaccccaaaacaccaataattacatcctcttataataattttccctctaactattgctccaacaagaactttcatctacaaaacagatgctcaaaatcattattaattgcaaaaaattccattagggtatgtgtgggtttcttgcttgtagatatatatatttatatggcaatttctttctttctttcttcctaaattatacataagatagaattgagttttctattttacaattaagaaaaataatattgtgttaacatttaatagacagatactgcaaatcaaactgagcctcctgaatctaatactaaatattcagtagtaactaaaattttaagctttgggcacacatgttggaaacttcaaagaccgtatacattcataggagttatctcatgcgcttggtaagtactcattattttcaatatgctcttaattttaattccaaatacggtcatttgtataattatatatataaacattttctttttaaaaatgtttttttttttcctaataattattattttgtacttactccaaatgttaggaaaattttagggaaaaaaagtatttgtaacttgtaactaattgggttaccctatgtgtgtaactagctaggattaggaagaatccggagaggggcataagcatcactataggtagcatatcttttaaaaatattaaaaatctctatagtaaaaatataatattttatttatatttttttcattatttttaacactttttttttttttaaaaaaaaaaaaaacattctaatactataacacttttaaaaaatacaacaattataatctaatacattatattgcatttgtctaaatataatcccctaaactaataacagaagttgccaatatatattgtaattatattaaatattttatcaaattttgaatatttttgaataatttatattgtcaaaaagagaattcaaaccgataattacacatttttattttttattttttatttttaggtaggtgcatttaaattactatttggagtttagttttgaatattgtaaattattcataattaattttttcaaaacctattggatgtactctactataactttaatgtagacaatcttatagaaaaaaaaaaataaccgatctataatttgatcacattcaagaaatacactcttatcaataggaaaaaagggacacattttaacaaaaattagaagtttttagaaaaatattaaattttgggtaaaaatttataattttattataacatgaaattcttttataaaaataatgtctttttattgaacaatcgcaaaacaacaaaacagaataattaaaacaacagtgaaaaactaaaattaaccgtgaaacaacagtaaaaacttaacacagtacacactacacagtataaaacttacacagtattttcgaaaaaaaaacagtatttttgaaaaaaatttaccctacaataaaaaagtataaaaattaaaaatttcaatatgaaatgtaaaaactcctttataatttgagcgaaaatttcctttattcatgaatcatgtgtcactaagaaaaaaaaacctatatcctttataattaatgatgacttttagtcacaatttagattttatgaaactaaacatcactcttattcataataaaatgctaacatatttagtccaccatatttttatttttagttataaattttgtagtaattaaaataagattttttgtaatatgtgtatcaagtgtatatatgtgcaaccaacttgattgcaattgatgtattaattttgttttgttattggagaacagtggtttgtttgggagagagttgtttcataacacaaatttattgagttggtctctgatgttgaaggcattctcttctttgatggttattttgagcgttaatttgtgtactaatatcattaatcagattaccgatttggacatcgacaggtacaattatcactacatttttaattttgtaaaattaaactaatattgattacacttaattaatataattttcattatcaggataaacaagcctgatctaccactagcttcaggggaaatgtcaattgaaacagcttggattatgagcataattgtggccctaactgggttgatactaactataaaattgaactgtggaccactctttatttctctgtattgtgttagtattttggttggagctctctattctgttccaccttttagatggaagcaaaatcctaataccgcattttccagttattttatggtaatttattttattataagtaatgatatatgcacacaaataatatatatagaaaaaaatatcacttttatattaagctgagcatattttataatttatatatatatcattactgtttactttactatgagtaattaatgaatgttacacaaaatattatagcaacactgctacgttattaaaagtagtattttagtgcacgtttactacttcttatctttaactgtaacttttgataatttttctataactaattaattaattaattttttcaaaagaaatcaatttaatatgaggtaattatttattaaaatatataacactgtgcagggtctggtgatcgtaaatttcacatgttattatgctagcagagcagcttttggcctaccatttgagatgaggtgggtactaccacaaattaataccaataaaaattacacatatcaatatatttgttagtaattaaacaataataaaaaaaaaaaaactaaagaaaatagaaaaataaatactaccatcattttgattacaatatttgtactccaaaaatattcaaagacaactatcgatgtaattaatttgttaagtctaatttttattgcttttctcataatttttgaaagaaaaaaaaagtcatcatagtgtattaattaaatattgagaatatatgaaagattttgttttgaaataaataaaaaaggttaaaataaaagaagaatcatgtacttttgtttaaaaaataaaaatcatggaaaatgagaaattaatcaaattctagactaactaaaattattccaatgatcactttaaattttagcgattaagggaacgtttggtaatactttttgttttttttaattttaatcataaaaataaaagtaaaatttgtgtttttaatttttttttttaaaaaatagaaatgtacttctctataaccactgttattttttaatttttaattttatttttatttaagtcgaattcaaatctgtgtctgaggtcgaggttgtggtccgagtccacgactggggctagggccggattttgggtaccaaggtctaagttggggtcaaagtcgaccaaaatactgattaagaaaaaaaaaaccatttaaaaaatggataaagtgattattttttttgttttattttcaaatttttaaaagtttaattctcaattaaaaaaagtgaaaataattttataaaagatgtttttaaaaagtattttcatttttctaaaaaaataaaaagttaattaaaaaaatgttgccaatttaaattaatgaggtatatcatgtaaaatgatttttaattatttcttcattgggataattcgacttttgtgttttttttttttttcttgctgaacgattcttatcaaaatttgatgtattataatatctcatcatgtgtttgaatttgagtttcagtcctccttttactttcatcctagcctttgttaaatcaatgggatcagctttatttttatgtaaagatgtttcagacattgaaggcgactccaagtatgttaaattcttatgccaaccttaattagtttaattagttattttatttaaaattatcatttataaatattttattatcattttttttccttttttttttttaaacacacacttaataatattacttattatcttatttctatataggcatggcatatcaaccttggcaaccagatatggtgctaaaaacataacatttctttgttctggaattgttcttctaacctatgtatctgctatacttgctgccattatttggccacaggtattttattaattatacattatgaggtactaaaatattgtctaacacacatgccattaattattatttgtataatttaatattacattttaatacatattctaatttaattagataaaatttaaattcatatcatattatatttaccatatgagtcacacccgaaataatactcataagattcatccattcaattcttgattaatttattattatttctaaaataattcaagtattttatttattaatgttaattgtcttttcatcatttcttatttaattacaggctttcaagagtaacgtaatgttactttcacatgcaaccttagcattttggttaatttttcaggtttgccatttaaattctcacaaaagaaattaagagcaaatatattattataataatttttttcacatatttataaatatttttaattgtttaattgcgtacagactcgagagtttgctctaacaaattacaacccggtaattatatacttattattattattattattatattattattattattattattattattattattattattatatacataaaaataatataattttctaattaattattaatcatacattgattatttatatatatatattggttgtacaatgcaggaagcaggcagaaaattctacgagttcatgtggaagctccattatgctgaatatttagtatatgttttcatttagagccttgttattataaaacacacttactctcaacctattataaataaaatttattgttattgatataatttagtagcaaatctttacatagttata

SEQ ID NO: 146 - DNA, 5011 bp, Cannabis sp.
ccctcttgtcctttttaatcaacaataatcctcatggagctctcatcagtttgtaacttttcatttcaaactaattaccatactttattaaaccctcataataagaatcccaagagctcactattatcttatcaacaccccaaaacaccaataattacatcttcttataataattttccctctaaatattgctccaacaagaactttcatctacaaaacagatgctcaaaatcattattaattgcaaaaaattccattagggtatgtgtgggtttcttgcttgtagatatatatatttatatggcaatttctttctttctttcttcttaaattatacataagatagaattgagttttctattttacaattaagaaaaataatagtgtgttaacacttaatagacagatgtatctgcaaatcaaactgagcctcctgaatctaatactaaatattcagtagtaactaaaattttaaacttcgggcacacatgttggaaacttcaaagaccgtatacattcataggagttatctcgtgcgcttggtaagtactcattattttcaatatgctcttaattttaattccaaatacggtcatttgtataattatatatataaacattttctttttaaaaatgttttttttcctaataattattattttgtacttaccccaaatgttaggaaaattttagggaaaaaaagtatttgtaacttgtaactaattgggttaccctatgtgtgtaactagctaggattaggaagaatccggagaggggcataagcatcactataggtagcatatcttttaaaaatattaaaaatctcaaatataatattttattttatatttttttcattatttttaacactttttttttttaaaaaaaaaaaaaaaacattctaatagtataacacttttaaaaaatactacaattataatctaacacattatattgcatttgtctaaatataatcccctaaactaataacagaagttgccaatatatattgtaattatattaaatattttatcaaattttgaatatttttgaataatttatattgtcaaaaacagaattcaaaccgataattacacatttttattttttattttttatttttaggtaggtgcatttaaatttactatttggagtttagttttgaatattgtaaattattcataattaattttttcaaaacctattggatgtactctactataactttaatgtagacgatcttatagaaaaaaaaaataaccgatctataatttgatcacattcaagaaatacactcttatcaataggaaaaaagggacacattctaacaaaaattagaagtttttagaaaaatattacattttgggtaaaaatttataattttattataacatgaaattcttttataaaaataatgtctttttattgaacaatcgcaaaacaacaaaacagaataattaaaacaacagtgaaaaaactaaaaataaccgtgaaacaacagtaaaaacttaacacagtacacactacacagtataaaacttacacagtattttcaaaaaaaaaaacagtatttttgaaaaaaatttaccctacaataaaaaagtataaaaattaaaaatttgaatatgaaatgtaaaaactcctttataatttgagcaaaaatttcctttattcatgaatcatgtgtcactaaaaaaaaaaacctatatcctttataattaatgatgacttttagtcacaatttagattttatgaaactaaacatcactcttattcataataaaatgctaacatatttagtccaccatatttttatttttaagttataaattttgtagtaattaaaataagattttttgtaatatgtgtatcaagtgtatatatgtgcaccaacttgattggaattgatgtattaattttgttttgttattggagaacagtggtttgtttgggagagagttgtttcataacacaaatttattgagttggtctctgatgttgaaggcattctcttctttgatggttattttgagcgttaatttgtgtactaatatcattaatcagattaccgatttggacatcgacaggtacaattatcactacatttttaattttgtaaaattaaactataatattgattacacttaattaatataattttcattatcaggataaacaagcctgatctaccactagcttcaggggaaatgtcaattgaaacagcttggattatgagcataattgtggccctaactgggttgatactaactataaaattgaactgtggaccactctttatttctctgtattgtgttagtattttggttggagctctctattctgttccaccttttagatggaagcaaaatcctaataccgcattttccagttattttatggtaatttattttattataagtaatgatatatgcacacaaataatatatatagaaaaaaatatcacttttatattaaggctgagcatattttataatttatatatatcattactgtttactttactatgagtaattaatgaatgttacacaaaatattatagcaacactgctacgttattgaaagtagtattttagtgcacgtttactacttcttatctttaactgtaacttttgataatttttctataactaattaattaattaattttttcaaaagaaatcaatttaatatgaggtaattatttattaaaatatataacactgtgcagggtctggtgatcgtaaatttcacatgttattatgctagcagagcagcttttggcctaccatttgagatgaggtgggtactaccacaaattaataccaataaaaattacacatatcaatatatttgttagtaattaaacaataaaaaaaaaactaaagaaaatagaaaaataaatactaccatcattttgattacaatatttgtactccaaaaatattcagacaactatcgatgtaattaatttgttaagtctaatttttattgcttttctcataatttttgaaagaaaaaaaaaaagtcatcatagtgtattaattaaatattgagaatatatgaaagattttgttttgaaataaataaaaaaggttaaaataaaagaaaaatcatgtacttttgtttaaaaaataaaaatcatggaaaatgagaaattaatcaaattctagactaactaaaattattccaatgatcactttaaattttagcaattaagggaacgtttggtaatactttttgttttttttaattttttaatcataaaaataaaagtaaaatttgtgtttttaatttttttttttttaaaaaaatagaaatgtacttctctataaccattgttattttttaatttttaaattttttaattttatttttatttttaattttatttaagtcgaattcaagtctgtgtctgaggtcggggttgtggtccgagtccacgactggggctagggccggattttgggtaccaaggtctaagttggggtcaaagtcgaccaaaatactgattaagaaaaaaaaatcatttaaaaaatggttaaagtgattattttttttggattgttttcaaaatttttaaaagtttaattcttaattaaaaaattgaaaagtgaaaacaattttataaaagatgtttttaaaaagtattttcatttttctagaaaaataaaaagttaattaaaaaaatgttgccaatttaaattaatgaggtatatcatgtaaaatgatttttaattatttcttcattgggataattcgacttttttgtttttttttttcttgctgaacgattcttatcaaaatttgatatattataacatctcatcatgtgtttgaatttgaatttgagtttcagtcctccttttactttcatcctagcctttgttaaatcaatgggatcagctttatttttatgtaaagatgtttcagacattgaaggggactccaagtatgttaaattcttatgccaaccttaattagtttaattagttattttatttaaaattatcatttataaatattttattatcatttttttttaaacaaacacttaataatattacttattatcttatttctatataggcatggcatatcaaccttggcaaccagatatggtgctaaaaacataacatttctttgttctggaattgttcttctaacctatgtatctgctatacttgctgccattatttggccacaggtattttattaattatacattatgaggtactaaaatattgtctaacacacatgccattaattattatttgtataatttaaaattacattttaatacatattctaatttaattagataaaatttaaattcatatcatattatttttaccatatgagtcacacccgaaataatactcataagattcatccattcaattcttgattaatttattattatttctaaaataattcaagtattttatttattaatgttaattgtcttttcatcatttcttatttaattacaggctttcaagagtaacgtaatgttactttcacatgcaaccttagcattttggttaatttttcaggtttgccatttaaattctcacaaaagaaattaagagcaaatatattattataataatttttttcacatatttataaatatttttaattgtttaattgcgtacagactcgagagtttgctctaacaaattacaacccggtaattatatacacttattattattattattattattattattattattattattattattattattattattattatataaaaaataatataattttctaattaatcatacatttgattatttatatatatattggttgtacaatgcaggaagcaggcagaaaattctacgagttcatgtggaagctctattatgctgaatatttagtatatgttttcatttagagccttgttattataaaacacacttactctcaacacattataaataaaatttattgttattgatataacttagtagcaaatctttacatagttata

SEQ ID NO: 147 - DNA, 7225 bp, Cannabis sp.
tttctttttaatattcaatcaataataatcttcatgggactctcatcagtttgtaccttttcatttcaaactaattaccatactttattaaatcctcacaataataatcccaaaacctcattattatgttatcgacaccccaaaacaccaattaaatactcttacaataattttccctctaaacattgctccaccaagagttttcatctacaaaacaaatgctcagaatcattatcaatcgcaaaaaattccattagggtatgtgtgtgtctcttacttctatatatttgtatgtttttttttcttcttaattatacataatatttaattaatattatatttaattagagggtaattagaattgtgctttccattcttcaacctaaaagaaaaaaatacacaacaacaacaacaatcaataataataataatgtgttaacaggcagctactacaaatcaaactgagcctccagaatctgataatcattcagtagcaactaaaattttaaactttgggaaggcatgttggaaacttcaaagaccatatacaatcatagcatttacttcatgcgcttggtaagtatatattcattctcataattttatttttaatatattaatttacaaattgagaaaattacaaattttatgagtttttatactttctgtgcaaaaatatggcatttttctcaaatatgaaaaaatcaaataagaatacccttagaagttagagttactagagaaataagtagttactttatattatttttttcatatttttttaagcttttttattttaaaattttccataaaataacattttttttaaaaaaaaaaaaactatatatatatatacttacaaatttatatcttaaaaactataaaaataaaaattagggatcacaattatacctgcgggtacctgctcctaatggggcaggggcggactttcgagggtgggaacaggtatgagtttaaatattcatactcgagtcaaaaataataaaggggtatgagaatagatacccactccgaacctgtcctgatatcatatatgtatatatttaagttttaaaatcataatactacaattaaaataacttcatgcttttttttactaattacactaatgagatatttcaattttcataaaaatgtccggggtgatgcatattaataatcacatttaactgctttaaaagaaaaatgacacttaaccatttatttatgattaccaattttgtatttattaattctatttactatacacactatttcacttatgtttattgtgttaatgagtttttatgcttgtttttcttctaaattttctttgagatattatttttttttaaaaaaaaatatatatgtaatgggtacttaatagaaatctttttcctgacgggtaactctcgtcccgtctttgttttaatttaaataagtattgaggtgaatatagaataaatttagaaagcatgtatagaaatagaaaagaaatctctgtccttgccccgccctcctgtacatttaagttggtaggggcatgggcagtagcgagctgagctataagactaagtatcattttaaataatataatatgctaaaaattattaaaatttgtatttttaggggccctatttttaaagtatttaatataatttaaagctaaaacataatgatatagattttggtgtcaatggataagaagctctttaataaaattcttaatggtaggagtttcatttctatcatgagcatttttataaaatgaaaaataaaataaactttggtatttgaacacacatatgtaaagtactaattttactctaacaaaccctttgttaattttttattgctagttttaattatactatatgatgtaattaatttaaaaatatatgttataatttttattttaaaggggtgacgctcaccctcatctgcacgtaggtacattcctaggtataggcatacttttagcattttgagaaaaatataactcaatattttttatataataatgtatatgtagttatagtagatatttaaactagttctgaaaattttcaaacaatattaaaaataggatttaaataggcaattgcaatcatacatgttgtttttataaatatatattatgtgcacaattatacatgttgtttttactataaactcgatcctaattctaacccctgtctaaggttcgtgattggggtcgaggtccaagtgagggtcggggttcgagtttgaattcgaggttcaaaatttgtggttgggtcaaagcatgggtctagtttgaaatattcgaggacaggtcgagtctgagtttgtaacctaggtcgaggttggggtcagggtccaaggtcgagtcgcagtctgaggtttggggtcagaggtcgggttgggggtttgaggtttggggttcgatgtcgggtcggggtccaaggtcgggtcatgtctggattaggccaggtcgagtccgaggttgggtcggggtttaagacgggtttgaagtttgagatcctgggtcgtagtccaggtttggggttcggtgctaaagctggggccaggtctggggttcgggacccaaacccgaaccccatatcctttgtaaatattattaatcaagttaatacgaatcatttgttatgtattaaattatacaattcacattgtattagagcttatttggtaggtcgtataaggattgtattgtattaaataataaatgtattgtattaattattacaacaaattttttatacaatgtaagttgtattatttaatacataacaaatggtatgtattagcttatattataatttatttataaaagatccggaatcaaccccaatctccgacccgaacttgaactcgagactcgaaccgagatctggactcgaaactagactcggacccagacccaaacttgggaccgaactcgaaccttagacccgaatccaaaaatggactcggacccaaacccgacctagaactaggacctgggacccggacccggacctgagacccgagacccgagactcggactctaaatgggttggatttaggttttaatttttaattaatacaatataatattttatctaaacgtaatgttacttattatttaatacaatacaattcttatatgacttaccaaacgagctctaattgtacattatttactaatcaaaacaaaattggacagatcatagcaaacatagattaactttcttattcttacaaacccaaaccctcataagttattggttttactttatataagcaatgatttagtgggccatagtaaaataattatttttgagtccttatttaaaaaaaaaaaaattaaaccttggagctagatgggccctaggcacatgcttggtccgtctatgcttaaggttggacctttatatgatacaaagagagatctcgtgaaaaaaaaaaaaaaagaagaagagagatctcgttacagaaagaagaagaagaaaacataattatttttttatatattagttttaatttgttattattttttaaatttcaaaattatttttaaatcagttttataatatttaaataactaaacttattcgaacatataaaaacacatacatccacgtgtacaatgtcaatctatttggcatttaacataagaaagaaaaggccaccttaaataacaaaatagaagcaaagattaacatattttgtccccaaaaaattagatttgagagttaaatgtggcaatacataaatattaagttgtataatattgaataaaacaacattgttacaaataattaatatatgatatttgttttaattttggtatgggagagcagtggattgtttgggaaagagttgttgcataacacaaatttaataagttggtctctgatgttcaaggcattcttttttttggtggctatattatgcattgcttcttttacaactaccatcaatcagatttacgatcttcacattgacaggtatcacataattctaatttcaatttttttatataacaatctaaattctacttattaaaagaaatttgtatagatttcaaaaaaaataaagaaagaaagaaagaaagaaattatatgcattttatgatttttttttttttgactgtgtttttaattattaatttgagttaataattttagtaatatttaattatacttgttatgctattgaacttctagtaggataacaattataatttttgtgggtcataaataaagttgggctatttgtttattaaaagaatgtgtaagtttttttttagatttataaaaattagtgcacaactaataatctccccaccaacaattttttgtaacaaaaaaaaaaattaagatgaattttaagttattgatgagtaataattttcagaataaacaagcctgatctaccactagcttcaggggaaatatcagtaaacacagcttggattatgagcataattgtggccctgtttggattgataataactataaaaatgaagggtggaccactctatatatttggctactgttttggtatttttggtgggactgtctattctgttccaccatttagatggaagcaaaatccttccactgcatttcttctcaatttcctggtattttactttactaacaataatcatatcttcacacaaaatatgtattgaaatattattcacttctatttaattataactatcatattttttctgttactaatttcttaattttattaagatcaccatttagttagatgagataattattaaagtaagatttctatcaaaaaatttattaaagtaagattgtacactcccatatttatatataaatatatatattcgttggaattttatttttatgatttctaaagcataaatttgtaaaaactatagctttttcttaaaaaaaaaagttaaaaaatatacataaaaaaaataacataagatacttagttatttatttttagtaattagttacctctctggttactataagagtatctaattaccaaatttctcatattaaaaaaaaactatatttttacactaaaaatataaaaacttataaaatttataattttcatatattttttttaatctgcttgcacaggcccatattattacaaatttcacattttatcatgccagcagagcagctcttggcctaccatttgagttgaggtgggtaatagtatctatttaattgaaaacttaatactatcctaagatatactatataatataggatatataagtttataatacaccacttaagaattttcttttagcattcgagagtaattaagttttagttcaattttttcatatataattatctgtaaaatttcaaaacaaaaaattgaataatttaaaatattcaaataagattcaaacaatatatatataaaaataaaaatcataaatgtaataatatatttaattaaatattattttcaacaccataaactatttaattttttaaaaaaatttacatgtctaaaaaattctgataaatactaaaacacgtattttagagattggagtgtacttaaactttgtaaacttttccaataacataaacgatttccctgtattttaaatttgattgtattatatgtttgaatttcaatttgattttcaggccttcttttactttcctgctagcatttatgaaatcaatgggttcagctttggctttaatcaaagatgcttcagacgttgaaggcgacactaagtatgttaaattcttttatataaaccttataattagtttaaattaataattattattgatgaaataatttttatatatttttttcaattcagatttggcatatcaaccttggcaagtaaatatggttccagaaacttgacattattttgttctggaattgttctcctatcctatgtggctgctatacttgctgggattatctggccccaggtatctcatctatattatttgtatttcaatatatattgtgagacaattaataaagtttaatatcacaattaatatactctaatttaaatgaaaaactttttaatcaaaccaaaccaaacaaaacaaaagcctactggaataaatgcagcagctcaaagaaagccaaactaccaattttgaagcctactaatatgattggtagtattacaagtaaagtcaaaaatgcaattgttcctgttcaaccacaaaaattaaatggttgttgtcatgacagagtttaaaacactatcttgcaaattagtgagaggcttgaagtaccaattctttccactctttaaagtcttgaggccattgatacagaccaagccatcttcctatatcagttataattttgttggtaaaacaacaattcacaaacaagtgatggtgggtttctctataagcttcacaaacaggacacaaattagaaggaataggcataatgttgcttatgtgatccctagttaatagttaatcattaatagcttgtcagtaaataaaggggccggtgcttaggtataatattgagcttgtgccaaacttttggagcatattcaactttttttgctttgattagagagagataaaactctttgactttaaactttccatacctgccaactcgaatcaaagcctctatgtcaatggtggcccttagctttaagaatttattaaaaaaccaggtttgccatcatttcttctcatcatttcttatttaattacaggctttcaacagtaacgtaatgttactttctcatgcaatcttagcattttggttaatcctccaggtttgccattttgaattaaattatctatttaaaaaaaacaaatatatcattatatttaaaaaaaaattctaaatatttttaattgtttaattgtactttacagactcgagattttgcgttaacaaattacgacccggtaatactcaaaatgactaccattaattgtgttattatcctctttattagtacataaaaataatactaattttctaatgaattaattttacatctgattatattttatattgggttgtacaatgcaggaagcaggcagaagattttacgagttcatgtggaagctttattatgctgaatatttagtatatgttttcatataattaagacacattaggtgtccaacacattatattatttatagctaaatattcgtataatttagtggtggatcttacctatttaaatttaaatgtatgcatt

SEQ ID NO: 148 - DNA, 8269 bp, Cannabis sp.
ttttttcttaatattcaatcaataataatcttcatgggactctcatcagtttgtaccttttcatttcaaactaattaccatactttattaaatcctcacaataataatcccaaaacctcattattatgttatcgacaccccaaaacaccaattaaatactcttacaataattttccctctaaacattgctccaccaagagttttcatctacaaaacaaatgctcagaatcattatcaatcgcaaaaaattccattagggtatgtgtgtgtctcttacttctatatatttgtatgtttttttttcttcttaattatacataatatttaattaatattatatttaattagagggtaattataattgtgctttccattcttcaacctaaaagaaaaaaatacacaacaacaacaataatagtaataatgatgtgttaacaggcagctactacaaatcaaactgagcctccagaatctgataatcattcagtagcaactaaaattttaaactttgggaaggcatgttggaaacttcaaagaccatatacaatcatagcatttacttcatgcgcttggtaagtatatattcattctcataattttatttttaatatattaatttacaaattgagaaaattacaaattttatgagtttttatactttctgtgcaaaaatatggcatttttctcaaatatgaaaaaatcaaataagaatacccttagagttactagagaaataagtagttactttatattatttttttcatatttttttaagcttttttattttaaaattttccataaaataacttttttttttttaaaaaaaaaaaaactatatatatacttacaaatttatatcttaaaaactataaaaataaaaattagggatcgcaattatacctgcgggtacttgctcctaattgggtaagggcggactttcgggggtgggaacaggtatgagtttaaatattcatactcgagtcaaaaataataaaggggcatgggaatagatacccaccccgaacccgtcccgatatgatatatgtatatgggcatttcacaaaaatactggatttggggtaatacttatcaattttactgccacacggcagaattaacatttatactgtcctccctttttttttgttcttttatactgtcaataccaaaacaaaagtatgagacctccatctttgacaatcacagacataaccaccacaacaacaccaagacaaccgaaaaataaccattaattccgacaagattgaacaaaagcagtaaaatcgacgtcaataaataatcatggcaaaacaacggtaaaacaacactaaaacaatcaaacaaaacaaaagaaaaaaatgattaaaaaaacaaacaatctgctgcacaacctcaacaccagatgcaaaatcaactatatttgcaagtctattcctagaaaattataataaaaaaaactactaaaacaacactgaaacaacacaaaaacaaatgaagcaaatataactacttagaaaaatgtaaaagaaacacacacctcaaaactctcttgtgagtgagctcgtcaaatatatttataggagaaccaaaagaaaaaaaccacaaaaatagccaaagagaacgaagaagaaatgtatttatagcctccatcttccacactcacagacagaaccatcacaacaacacgagaacacccagaaaatacctattaattccagcgagatggagcaagggcagtgaaatcggcatcaaataaataaatcatgaaaaacaacagtaaaacaatactaaaacaatactaaaacaaataaaacaataaaagaaaaaaatgatcaaaaattaactatgttgtgcacatcctcaatactaaatgcactatatttgcaagaaagttctagaaaattagaacaaaaaaaaaccacactaactcttatattttcaaaaaaaaaacataactaagaacttcaaaaaattaaaaaaaaaaaaaaaaaaaaaaaaagaaaagaagaaaagaagaagaaagaactgaacatgaaaaaaaataaaaatcatgaaaaaacaacagtagaacaatactaaaacaacggtaaagatgaagaaaaaaaaacttgaagaagaagatgaatattagaacatgggggtgagatttatgtgaaaagctagaagataaagatgaagaagaagatgaatcgtgagaaatgggagtgagatttttaaatctatttaaataaaagaaaaagagtgagacatggggtgtgatttttaaatttatttaaataaaagaaaaagtaaaacatgtcacttttatgacacatcccatcaaccttttcatcaaaataataattattaaattatctcaaaaaataataattattaaatattaaaaataataaataataattttacatccattaaaataaaaaattaaataaataacttgagcccatgtcccaatcaatcaaaaaaaaaaaaacaaaacaataacatatacaatttggcagtatactgccgaaattaaaaaaaaaaaaaaacagtataaacgtaaatttgggcgtggtacagtatttttgtaatacatggggaaaagttagtaaagagtgtaaatttccctatatatttaagttttaaaatcataatactacaattaaaataacttcatgctttttttttactgattacactaatgagatatttcaattttcataaaaaagttcgaggtgatgcatattaataatcatatttaactgctttaaaagaaaaatgacacttaaaccatttatttacgattactaattttgtatttattaattctatttactatacacactatttcacttatgtttattgtgttaatgagtttttatgcttgttattcttttaaattctctttgagacattatttttttcttttaaaaatatatatgtaatgagtacttaataggaatctttttcctgacaggtaattctggtcccgtctttgttttgatttaaataagtattgaggtgaatatagagtaaatttagaaaacatgtatggaaataggaaagaaatctctgtccttgccccgccctcctgtttacatttaagttggtaggggcatgggcagtagcgagctgagctataagactaagtattattttaaataatataatatgctaaaaattattaaaatttgtatttttaagggccctatttttaaagtatttaatataatttaaagctaaaacataatgatatagattttggtgtcaatggataagaagctctttaataaaattcttaatggtaggagtttaatttctatcatgagcatttttataaaataaaaaaaaaaataaactttggtatttgaacacacatatgtaaagtactaattttactctaacaaaccctttgttaattttttattgctagttttaattatactatatgatgtaattaatttaaaatatatgttataatttttattttaaaggggtggcgctcaccctcatctgcacgtaggtacattcctaggtataggcatacttttagcattttgagaccttgggtcgtagtccgggtttggggttcggtgctaaagttggggccaggtctggggttcgggacccaaacccgaaccccatatcctttgtaaatattattaaacaagttaatacgaatcatttgttatgtattaaattatacaattcacattgtattagagcttatttggtaggtcgtataaggactgtattgtattaaataataaatgtattgtattaattattacgacaaatttttaatacaatgtaagttgtattgtttaatacataacaaatagtctgtattagcttatattataatttatttataaaagatctggaatcaaccccaatctctgacccgaacctgaactcgagactcgaatcgagatctggactcgaaactagactcggacccagacctaaacttgggaccggacccgaacctgagacccggacccagacatggactcggacccaaacccgacctagaactaggacctgggacccggacccgaacccaagacccgagacccgagactcaaactctaaatgggttggatttagattttaatttttaattaatacaatataatattttatctaaacgtaatgttacttattatttaatacaatacaattcttatatgacttaccaaacgagctctaattgtacattatttactaaccaaaaaaaattggacagatcatagcaaacatagattaactttcttattcttacaaacccaaaccctcataagttattggttttactttatataagcaatgatttagtgggccatagtaaaataattatttttgaatccttatttaaaaaaaaaaaaaaaaaatttaaaccctggaactaggtggtcgtaggcacatgcttggtccgtctatgcttaaggttggaccttcatatgatacaaagagagatctcgtgagagaaaaaagaagaagagagatctcgttacaaaagaagaagaagatgacataattatttttttatatattatttttaatttgttattattttttaaatttcaaaattatttttaaatcaattttataatatttaaataactaaacttattcgaacatataaaaacacatacatccacgtgtacaatgtcaatctatttggcatttaacataagaaagaaaaggccaccttaaataacaaaatagaagcaaagattaacatattttgtccccaaattaaaaaattagatttgagagttaaatgtggcaatacataaatattaagttgtataatattgaataaaacaacattgttacaaataattaatatatgatatttgttttaattttggtatgggagagcagtggattgtttgggaaagagttgttgcataacacaaatttaataagttggtctctgatgttcaaggcattcttttttttggtggctatattatgcattgcttcttttacaactaccatcaatcagatttacgatcttcacattgacaggtatcacataattctaatttcaatttttttatataacaatctaaattctacttattaaaagaaatttgaatagatttcaaaaaaaaaaaaaagaaagaaagaaattatatgcattttatgacttttttttttttttgactgtgtttttaattattaatttgagttaataattttaggaatatttaattatacttgttatgctattgaacttctagtaggataacaattataatttttgtgggtcataaataaagttgggttatttgtttattaaaagaatgtgtaagattttttttagatttataaaaataagtgcactactaatctccctagctacaacaattttttgtaacaaaaaaaaaaattaagatgaattttaagttattgatgagtaataattttcagaataaacaagcctgatctaccactagcttcaggggaaatatcagtaaacacagcttggattatgagcataattgtggcactgtttggattgataataactataaaaatgaagggtggaccactctatatatttggctactgttttggtatttttggtgggattgtctattctgttccaccatttagatggaagcaaaatccttccactgcatttcttctcaatttcctggtattttactttactaacaataatcatatcttcacacaaaatatgttctctttaattataactatcatattttttctgttactaatttcttaattttattaagatcaccatttagttagatgagataattattaaagtaagatttctatcaaaaaatttattaaagtaagattgtacactcccatatttatatataaatatatattcgttggaattttatttatttttatgatttctaaagcataaatttgtaaaaactatagctttttcttaaaaaaaaaaagttaaaaaaatatataaaaaaaataacataagatatttagttatttatttatagtaattattagttacctctctgcttactataagagtatctagttaccagatttctcatataaaaaaaaaaacaaaaaaaacaaaagaaactatatttttacactaaaaatataaacacttataaaatttatatataatttcctaatttttttttaatctgcttgcacaggcccatattattacaaatttcacattttattatgccagcagagcagctcttggcctaccatttgagttgaggtgggtaatagtatctatttaattaaaaactcaatactatcctaagatatactatataatataggataagtttataatacaccacttaagaattttttttttgtcattctagagtaattaagttttagttcaattttttcataattgtatacataatagttgtttataattatctgtaaaatttcaaaaaaaaaaaaaataatttaaaatattcaaaaaataagattcagacaatatataaaaaaataaaaatttgtaataatatatttaattaaatattattttcaacactataaactatttaaatttttttaaaaatttacatgtctaaaaaattctgataaatactaaaacacgtattttagagattggagtgtacttaaactttgtaaacttttccaataacataaacgatttccctgtattttaaatttgattgtattatatgtttgaatttcaatttgattttcaggccttcttttactttcctgctagcatttatgaaatcaatgggttcagctttggctttaatcaaagatgcttcagacgttgaaggcgacactaagtatgttaaattcttttatataaaccttataattagtttaaattaataattattattgatgaaataatttttatatatttttttcaattcagatttggcatatcaaccttggcaagtaaatatggttccagaaacttgacattattttgttctggaattgttctcctatcctatgtggctgctatacttgctgggattatctggccccaggtatctcatctatattatttgtatttcaatatatattgtgagacaattaataaaatttaatatcacaattaatatactctaatttaaatgaaaaactttttaatcaaaccaaaccaaacaaaacaaaagcctactggaataaatgcagcagctcaaagaaagccaaactaccaattttgaagcctactaatatgattggtagtattacaagtaaagtcaaaaatgcaattgttcctgttcaaccacaaaaattaaatggttgttgtcatgacagagtttaaaacactatcttgcaaattagtgagaggcttgaagtaccaattctttccactctttaaagtcttgaggccattgatacagaccaagccatcttcctatatcagttataattttgttggtaaaacaacaattcacaaacaagtgatggtgggtttctctataagcttcacaaacaggacacaaattagaaggaataggcataatgttgcttatgtgatccctagttaatagttaatcattaatagcttgtcagtaaataaatgggccggtgcttaggtataatattgagcttgtgccaaacttttggagcatattcaactttttttgctttgattagagagagataaaactctttgactttaaactttccatacctgccaactcgaatcaaagcctctatgtcaatggtggcccttagctttaagaatttattaaaaaaccaggtttgccatcatttcttctcatcatttcttatttaattacaggctttcaacagtaacgtaatgttactttctcatgcaatcttagcattttggttaatcctccaggtttgccattttgaattaaattatctatttaaaaaaaacaaatatatcattatttataaaaaaaaattctaaatatttttaattgtttaattgtactttacagactcgagattttgcgttaacaaattacgacccggtaatactcaaaatgactaccattaattgtgttattatcctctttattagtacataaaaataatactaattttctaatgaattaattttacatctgattatattttatattgggttgtacaatgcaggaagcaggcagaagattttacgagttcatgtggaagctttattatgctgaatatttagtatatgttttcatataattaagacacattaggtgtccaacacattatattatttatagctaaatattcgtataatttagtggtggatcttacctatttaaatttaaatgtatgcatt

SEQ ID NO: 149 - DNA, 7306 bp, Cannabis sp.
atgcatacatttaaatttaaataggtaagatccaccactaaattatacgaatatttagctataaataatataatgtgttggacacctaatgtgtcttaattatatgaaaacatatactaaatattcagcataataagcttccacatgaactcgtaaaatcttctgcctgcttcctgcattgtacaacccaatataaaatataatcagatgtaaaattaattcattagaaaattagtattatttttgtatgtaccaataaagaggataataacacaattaatggtagtcattttgagtattaccgggtcgtaatttgttaacgcaaaatctcgagtctgtaaagtacaattaaacaattaaaaatatttagaatttttttttaaatataatgatatatttgttttttttaaatagataatttaattcaaaatggcaaacctggaggattaaccaaaatgctaagattgcatgagaaagtaacattacgttactgttgaaagcctgtaattaaataagaaatgatgagaagaaatgatggcaaacctggttttttaataaattcttaaagctaagggccaccattgacatagaggctttgattcgagttggcaggtatggaaagtttaaagtcaaagagttttatctctctctaatcaaagcaaaaaaagttgaatatgctccaaaagtttggcacaagctcaatattatacctaagcaccggcccctttatttactgacaagctattaatgattaactattaactagggatcacataagcaacattatgcctattccttctaatttgtgtcctgtttgtgaagcttatagagaaacccaccatcacttgtttgtgaattgttgttttaccaagaaagttataactgatataggaagatggcttggtctgtatcaatggcctcaagacttcaaattggaaggattggtactttcaagcctctcactaatttgcaaatagtgtttaaactctgtcatgacaacaaccatttattttttgtggttgaacaggaacaattgcatttttgactttacttgtaatactaccaatcatgttagttggcttcaaaattggtagtttggctttctttgagctgctgcatttattgcagtaggctttggtttggtttggtttgaataaaaagttttcttttgtttaaataaataaataaatgaaagttataattgaatgagactaataaagagtattattcctatatggtaaatgtaacttgatttgtgtttaaattttcacttaaattagagtatattaattctgatattaaactttattaattgtctcacaatatatattgaaatacaaataatatagatgagatgagatacctggggccagataatcccagcaagtatagcagccacataggataggagaacaattccagaacaaaataatgtcaagtttctggaaccatatttacttgccaacgttgatatgccaaatcttgaaagaaatatataaaaattatttcatcaataataataattatttaaactaattataaggtttatatatagaatttaacatacttagtgtcgccttcaacgtctgaagcatctttgattaaagccaaagctgcacccattgatttaataaatgctagcaggaaagtaaaagaaggcctgaaaataatcaaattgaaattcaaacatataatacaatcaaattaaaatacagggaaatcgtttatgttattggaaaagtttacaaagtttaagtacactccaatctctaaaatacgtgtttcagtatttatcagaatttttagacatgtaaatttttaaaaaaatttaaatagtttatagtgttgaaaataatatttaattaaatatattattactgatttttatttttttatatactgtttgaatcttattttttgaatattttaaattattcaatttttttgttttgaaattttacagagaattatatatgaaaaaattgaactaaaacttaattactctcgaatgccaaaagaaaattcttaagtggtgtattataaacttatatatcctatattatatagtatatcttgggatagtattaagttttcaattaaatatactattacccacctcaactcaaatggtaggacaagagctgctctgctggcatgataaaatgtgaaatttgtaataatatgggcctgtgcaagcagattaaaaaaattagaaaattataaattttataagtttttacattttgtaaaaatatagtttttttttaatatgagaaatttgctaattagatactcttatagtaaccagagaggtaactaattactataataaataactaagtatcttatgttattttttatatatatattttttaacttttttttttaagatagttttttacaaatttatgctttagaaatcataaaaataaaattccaacgaatatatttttatataaatatgggagtgtacaatcttactttaataaattttttgatagaaatcttactttaataattatctcatctaactaaatggtgatcttaataaaattaagaaattagtaacagaaaaatatgatagttataattaaagagaacatattttgtgtgaagatatgattattgttagtaaagtaaaataccaggaaattgagaagaaatgcagtggaaggatttgcttccatctaaatggtggaacagaatagacagtccaccaaaaataccaaaacagtagccaaatatatagagtggtccacccttcatttttatagttattatcaatccaaacagtgccacaattatgctcataatccaagctgtgtttactgatatttcccctgaagctagtggtagatcaggcttgtttattctgaaaattattactcatcaataacttaaaattcatctcaatttttttttttttgttacaaaaaattgttgtagctagggagattagtagtgcacttatttttataaatctaaaaaaaatcttacacattcttttaataaacaaataacccaactttatttatgacccacaaaaattataattgttatcctactagaagttcaatagcataacaagtatattaaatattcctaaaattattaactcaaattaataattaaaaacacagtcaaaaaaaaaaaaaagtcataaaatgcatataatttcttctttcttttttttttttgaaatctattcaaatttcttttaataagtagaatttagattgttatataaaaaattgaaattagaattatgtgatacctgtcaatgtgaagatcgtaaatctgattgatggtagttgtaaaagaagcaatgcataatacagccaccaaaaaaaagaatgccttgaacatcagagaccaacttattaaatttgtgttatgcaacaactctttcccaaacaatccactgctctcccataccaaaattaaaacaaatatatattaattatttgtaacaatgttgttttattcaaattatacaacttaatatttatgtattgccacatttaactctcaaatctaaatttttggggacaaaatatgttaatcttttttgttatttaaggtggccttttctttcttatgttaaatgccaaatagattgacattgtacacgtggatgtatgtgtttttatatgttcgaataagtttagttatttaaatattataaaattgatttaaaattaattttgaaatttgaaaaaataataacaaataaaaaatattatataaaaaaataaatatatcttcttcttcttccttctgtaacgagattttctttcttttttctctcacgagatctctctttgtattatatgaaggtccaacttaagcatagacggactaggcatgtgcctagggcccacctagctccaaggtataattttatttttttttttaaaaaaataaatactcaaaaataattatttttctatggcccactaaatcactgcttatataaagtaaaaccaataacttatgagggtttgggtttgtaagaataagaaagttaatctatgtttgctatgatctctccaatttttttggttagtaaataatgtacaattagagctcgtttggtcatataaaaattgtattgtataaataataagtaacattacgtttagataaaatattatattatattaattaaaaattaaaactaggaatgtacctacgtgcagatgagggtgagcgccacccctttaaaataaaattataacatatatttttaaattaattacatcatatagtataattaaaactagcaaaaaaaattaacaaagggtttgttagagtaaaattagtactttacatatgtgtgttcaaataccaaagttattttatttttcattttatgaaaatgctcatgatagaaattaaaactcctaccattaagaattttattaaagagttatccattgacaccaaatctatatcattatgttttagctttaaattatattaaatacttaaaaatagggcccttaaaaatacaattttttagcatatttatattatttaaaatgatacttatctatagctcagctcgctactgccatgcccctaccaacttaaatgtcaacaggagggcggggcaaggacagagattctttcctatttccatacatactttctaaatttactcttaacctcaatacttatttaaattaaaacaaagactggacgagaattacccatcaagaaaaagattcctattaagtacccattacatatatatatatttttaaaaaataatgtctaaccagaatttaaaagaaaaacaagcataaaaactcattactacaataaacataagtgaaatagtgtgtatagtaaatagaattaataaatacaaaattggtaatcgtaaataaatggttaagtgtcatttttcttttaaagcagttaaatgtgattattaatatgcatcaccccgaacatttttatgaaaattgaaaggggttttttcattagtgtacaacaaaaacattatattacaaaaaatgtgcaaaaaaaacacaatttcaaaaatgtaacatttgaaaatatatttacaaaaattcatacatatttttaattaaattataatagaatataatgattcaactttctatatttagatttgtataactattttttatgactaattgatatggtattaatgagtaagcctaataattaacaaaatatatatattaataattaaaaaacataataagattctaattataaacaataatatttaaaatatacagatgtaatattttaaatataagacaaaaaaaaaattaacgattaaaataataaacagttttaaattaataataaaaagtgaaaaaatacattaaaaaaataaacaaaaacaacccatcaagtttaacaaaaacatatataaattaaaaaaaaaatacaaaaacaaataaacaatattaaaaaaatattacaacacgatacacaacaaaacataataaaaaaacccaaaacaacaaaagaaaaaaaaacaactaacaaagataaaaataccaaaaaaaggacatttatagatggagcatgaataattcttccaccaaaaaaatacattaaaaaaataaacaaaaacaacccatcaagattaacaaaaacatatataaattaaaaaaaaaacactaaaaacaaataaacaatattaaaaaaatattacaatgcgatacacaacaaaacataataagaaaaaaaaaaaaaaaaaaaaaaaagaaaaaaaacaactaacaaagataaaaataccaaaaaaaaaaggacctttatagatggagcatgaataattcttccaccaaaaaaatacattaaaaaaataaacaaaaacaacccatcaagtttaacaaaaacatatataaatttaaaaaaaaaacactaaaaacatataagcaatattaaagaaatattacaataccatacacaacaaaacataataagaaaatagttatacaaatagttatacaaatctaaatatagaaagttgaatcattaatatatctattatattaattaaagaatttctatgaaattttgtaaatatgttttcaaatatgtgcattttcaaaattgtgtttttttgcacgttttttgtaattatttaaaaaaatgtatacatttatgtaaaatgtccaaattgaaatatctcattagtgtaatcagtaaaaaaaagcatgaagttattttaattgtagtattatgattttaaaacataaatatatacatatatcatatcggaacgagttcggggtgggtatttattcccatgcccctttattatttttgactcgagtatgaatatttaaactcatacctgttcccacccccgaaagtccgcccctaccccattaggagcaggtacccgcatgtataattgcgatccgtaatttttatttttatagtttttaagatataaatttgtaagtatataatatatagttttttttttttttttaaaaaaaaaaaaaagttattttatggaaaattttaaaataaaaaagcttaaaaaatatgaaaaaaataatataaagtaactactcatttctctagtaactctaagggtattcttatttgattttttcatatttgaaaaaaataccatatttttgcacagaaagtataaaaactcataaaatttgtaattttctcaatttgtaaattaaatattaaaaataaaattatgagaatatatacttaccaagcgcatgaagtaaatgctatgattgtatatggtctttgaagcttccaacatgccttcccaaagtttaaaattttagttgctactgaatgattatcagattctggaggctcagtttgatttgtagtagctgcctgttaacacattattattattattattattattgttgttgttgttgtgtatttttttcttttaggttgaagaatagaaagcacaattctaattaccctctaattaaatataatattaattaaatattatgtatcattaagaagaaaaaaaaatatacaaatatatagaagtaagagacacacacataccctaatggaattttttgcgattgataatgattctgagcatttgttttgtagatgaaaactcttggtggagcaatgtttagagggaaaattattgtaagagtatttaattggtgttttggggtgtcgatataataatgaggttttgggattattattgtgaggatttaataaagtatggtaattagtttgaaatgaaaaggtacaaactgatgagagtcccatgaagattattattgattgaatattaaaaagaaaa

SEQ ID NO: 150 - DNA, 16893 bp, Cannabis sp.
ccactccaccaaggaaaactaaagagaagtaagtgtgtactgttgtcttattcttcccttgattatctataatattcctagttatgaagtgagtcatgagtaatgtaacaccctaactaatttaggcgtattacgtgatttttaaacgtactgtgcagctcgttgctaatcaacgaggtttatgaaaaaacgtgattaattaaaattttgctttttcattaaacttataaaccattttaccaaaaagtctcgggatcccgatttataaaaatatttacaaacgtttttactattcaacttttacatcaaaataaggtcatctaacgaccgttacaaaaatctcagccctgctgtcccgaggatcgtacgctccaggcctaaccgccccgacatgtacaatctcataagcccgctcacggtccatcagcaactgccttgcctttacctacacatgaacgcaaactgtgagtcgacagactcagtaagaaaagcatactaatatcatacataaaaactgactgccgtgtctaacacgatactgagtcccgctactgccatgtccaacatggtactgagcactactgccatgtccaacatggtactgagttttgaacgttcaggggacggtactattgacaaatatcctcctgatcggtcgaaccggtcatactccggctgctggtcatactccagcctgtaccgacgggataggtcaatagcactgaaccaccaaccagtgtcagcctgatcggtcgaaccggtcatactccggctgctggtcatactccagcctgtaccgacgtgacagggttgggtggttcgaagcctaaatacatatctaatgtaaactaacaggcttcctacatgcacgctaaacatgtaatctacatatgcatactgttatactaatcttacctggattacgatttcaggtgtgccggtcaacctgactggaactgaagctgaacggcggattactggctcctaaaccataaaaatcacaacgctataagtgacacgctaaatcacttcccggggactaaaactcgaaactaaaagtttccctatcgataaaaagcatggcaatacccctaaaaacccaaaaacgaggaaaactagggttctgaaaaatccccaaccggaagaccggttgcccaaccggaattccggttctgggaaaatctgaacccccatccggaattccggatgctcaaccggaattccggttcctcgcaggcagcaaccaaaaatttccataactcgaccaatttaaccccaattgatcccaaactttccagacctgctctataggtcccaaataacaattctaaagcatcaaacctacccagaaatcacacaagcaaatttcaccattgaagaccaagctttgagttcaagaactcaaacttggttaaacccactagcatgcaccctagcctagttaattctacttaactaagcattaaaacacctctgcaaactaacaataacatccagcaataacacagaaactaaacaaagcatttttctcacaaaatcacctattttcacatataatttaaaagcttgaacaacctaactaatatgctttcaacacagctcatttaacatcaaaaatcatgctttgaatcaacctaaatcaacaacaaaacacagcagaaacatctctcaaaaatcacatgcatttcatccattttcatcatttttctcaagcaatttaaagagaaagagttagaatttacataccacaacctagagttcacaactaggatgaatttagcttagagaattgaagaaaaacccagctttgcaccccaaagtacccagccgaaagtgaagaggaaaagagagagttttctttgaaaatttctattttttttctctaagtgttgaaaaatgaaagacttaaaatgaaaatgccatttaactaaactcatttcagctaacatttaataaaataaacacttatttttccatttaataaatcacataaaacaaaacactaatggggcaaaaagaccattttgcccctccaccataaaatcacataattcatactaaaggggtatttttgggacattctaaattcccggccattcccgacattcccaatgtctaaaacccatccccaaaatactaacatactaagttgtgatttctactgagccaaacgccgcgttccaaaataccggacaccggaaatacgaaacataaaagctactgatgacataattatgcatatctgaattccataaataacaatgataaattatttaaatagctataaataatttcctgattaacataaataactgctaatttccaaattaactaagcgggctttacaactattccccccttaaaaggatttcgtccccgaaatctaacctgaacaactctggaaattgagctcgcatatctgattctagctcccaggtggcttcttccaccttactgcttctccagagaaccttgaccaatgctatggtcttattccgaaggactttatcctttctatccaggatctgcactggctgttcctcataagacatatctgactgaagctgaaggctctcataactgagtatatgagaggggtctgaaacgtattttctcaacattgagacatgaaatacgttgtgcactgctgataaagctggaggcaatgctaaccgatatgccacttgacctatcttctcgtgaatctcgaaaggtcctgtaaatctagggcataacttgcctcttttcccgaaacgtttaatccccttcatcggagacactcgcaaaaacacatggtcccctactcggaactcaacatctctacgtttcggatctgcgtaactcttctgtctgctctgggaggcaagcattctagctttaattttctctattgcctcattggtccgctgaactgactctggacctaggtatttcctctcccctgtctcatcccagtggataggggacctacatttcctaccgtacaacagttcgtagggtgccatccctatcgtactctggtaactgttgttgtaagaaaattccactaacggtaggtatttactccatgaaccctcaaagtccataacacaggctctcagcatatcctccaatatctgaattgtcctttcggactgaccatctgtctgaggatggaatgctgtactgaattttagcttcgtacccattgcccgttgcaaactttgccaaaatttagaggtgaatttcggatccctgtccgaaactatagacttcggtaccccgtgaagtctcactatttccctgacgtataattctgccacctgatccactgtaaatgttgttctgaccggcagaaaatgagcagatttcgtaaatcggtccaccactacccagatggaatcatacatacccgtggtcctaggtaacccgaccacaaaatccattgtaatatcctcccatttccactctggtagggttagaggctgcaacaaccctgctggtctctgatgttcagccttgatctgctgacacgtgaggcatctcgaaacgaattctaccaaattcttcttcataccgctccaccagaagtacggtttcaaatcttggtacatcttggtggtgccgggatgtagagaatatggagtagaatgagcctcctcaaagatctcgttcctcaagtccacactgttcgggacacaaaccctggctttatacaaaagcattccactagctgacactgaaaagtctttggcttgaccagccaatacctcatctcggatcttcactaactccggatctgtcgtctgagcaacctttattctttctaacagatcagattgcagcgttaagttgtgaagctgacctaccacaaactcaatgctggatctaaccatatcctctgctagctgaggtgagatctgaaccatgctagccacttgcccgggaccctttctgctcagggcatcggccactacattggctttcccgggatggtaaagaatctcacaatcatagtccttcactaattccaaccaacgtctttgtctcatgttcaaatctttctgagtaaagagatacttgagacttttatggtcggtatagatctcacacttctccccatacaagtaatgccgccaaatcttcagtgcaaaaaccactgcggccaattctaaatcatgagtcgggtatcgctgttcataatcctttaactgacgggaggcgtaagcgataacccgatcggcttgcatcaatacacaccccaaaccctgtttggatgcgtcacagtagaccacgaacttctcctcgtccgaaggcaaagctagtaccggtgcagtaatcaatctctgtttcagttcctgaaaactagcttcgcatttatctgtccagataaatcgctgattcttctttgtaagctcggttaggggcattgaaattttggagaacccctccacgaacctacggtaatacccagctaatcccaagaagcttctgatctctgtcactgtcttcggtctcggccaatccctgacggattcgatcttcccgggatccaccttgatcccgtccttacccacaatgtgtcctaggaaggacacctgagacaaccagaactcacatttcttgaacttggcgtagagtctatgttctcgaagtcgttgcagtaccatctgaagatgtaactcatgctcctcttctgactgagagtacacgaggatgtcgtcgataaacacaatcacacagatatcgaggaaatccttgaatactctattcatcaggtccatgaatgctgcaggagcgttggttagtccgaatgacataaccaggaactcgtagtgtccatacctagtgcggaaagccgtctttggaatgtcctcctctcggatcctcaactgatgataacccgaacggagatcaatcttagaaaagaccgtctttccctgaagctgatcgaacaagtcatcgatcctaggtaatggatatttattcttcaccgtcagcttgttcaactctctgtagtcgatgcacatcctcatagatccatccttcttcttcacgaacaaaaccggggctccccagggtgacacactgggccgaatgaaccctatgtcaagcaacccttggagctgaatctttaactccttaagttcagctggagccatcctatacggggctttagaaaccggatccacccctggtgccaagtcaatcacaaagtaaatctcccgttgaggtggtaaccctggaagttcttcgggaaaaacgtccaaaaattcccgaaccacactgatgtcctctggccgaatggtgtctggccgagtggtgtccaccaccacggccagaaaccctaagcacccaccgtgcaataattctctcgctgacatagccgagatcaccgggatccgagatccctgaaccgaacccacaaacacgaacggttcttcactttccggttggaagaccaccatcttcctcttgcaatcaatgctcgccgaatatttagataggaaatccattcctaaaataatatcaagttcgactaagctcatctctatcagatcagcgcttaactctctaccatctatcctgatcggcatagacctaatccacctattggagataaccaattctccgccaggtaacagggttccaaaccctgattcatatctatcaaagggtctacccaacttactaaagactctggccgccacataagaacgtgtagccccagaatcaaacagcactgaataaagcgagtcgttaataagaatctgacctgtaacaactgatgggctggcatctggatcagcctgcgtgatcgcgaataccctggctggagtgggtatcgctggagccctcggtgcctctgaccggagctggggacattccctcttgaagtgcccgggcatgccacaatgaaagcatccctgccctttgcactccccccgatggtgcctcttgcagctagggcactcgggataggagaagcgagtctcattaccaccaggacgactccctctgttctggttcccccggaacctcttgttctgactcgagccgccggaagcagtgggtgccctcttcctctgatcaatggccgaaccactactccccctgctaaatcctgatgcaggaggggtaggagctccgccaccaaccggagtactggctgaatctgacatacaccccactgcgccctcagctcgcagtgccttctccaccatctgagcgtaggtggtgctgtcgtcagtggtaatcatcaggtcatgcctgatcttgggattcaacccgtccagatacttctcctttctgctgaagtcggttggcacaattcccgaggctaacctcgccaaccggtcaaactgagtagtatactcagtgacactcatgttctcccgctgggtcaggtgaacgaactctttcctcttggcgcttctaaccgcctcattgtagtacttcgcgttgaagagttcttggaacctctcccaagtcatggtggtgacatcgtgaatctgagacaccatgtcccaccataccagggcatcctcctggaactgaaatgtggcgcacaccactctgtcgttgccggtgacacccataaagttcagaattctggtgatcaccgtaagccactgctcggctttcgacacatctggacctcccaggaataccggaggtgcttgtttccggaacctctcatacaacggctccaatctatgggccgccactaccatctcggcctgggcagcaggggcaggtgccactggaactactggcactggaactgcaggagcaccctgctgtctcaacctctgaatctcgaggtcttgctcttcgatcctggcatgcatctccgcaaaccgtaactcccagttcggggctccctgatcggctgggggagcctgggcagcctgtggcgggttctcatcaccccgaccacgagccctgcctcggggacctctacctcggcccctagcaggtgggggaaaccgagctccctctccctgattcgaccccacggagttgcctcgactcctggtagtccgcctggcgtccatctagttagaaccgcctgcgaaaccaagagttggcatatcaggtcgtattcaaggcgagcttactaatgccgcttaattggaaattagaaatgaaacatgcgcctattctactatcaggctactaacatgcttcctaacaggcttttcttttttttttttataactgaataaaataaactactaaagcaataaaggcttactgaaccgtgaaccgagctaactgctgatgatgattgtacatgtcgtgacgatcttcagaagacaacctggcggctctgataccaagttgtaacaccctaactaatttaggcgtattacgtgatttttaaacgtactgtgcagctcgttgctaatcaacgaggtttatggaaaaacgtgattaattaaaattttgctttttcattaaacttataaaccattttaccaaaaagtctcgggatcccgatttataaaaatatttacaaacgtttttactattcaacttttacatcaaaataaggtcatctaacgaccgttacaaaaatctcagccctgctgtcccgaggatcgtacgctccaggcctaaccgccccgacatgtacaatctcataagcccgctcacggtccatcagcaactgccttgcctttacctacacatgaacgtaaactgtgagtcgacagactcagtaagaaaagcatactaatatcatacataaaaactgactgccgtgtctaacacgatactgagtcccgctactgccatgtccaacatggtactgagcactactgccatgtccaacatggtactgagttttgaacgttcaggggacggtactattgacaaatatcctcctgatcggtcgaaccggtcatactccggctgctggtcatactccagcctgtaccgacgggataggtcaatagcactgaaccaccaaccagtgtcagcctgatcggtcgaaccggtcatactccggctgctggtcatactccagcctgtaccgacgtgacagggttgggtggttcgaagcctaaatacatatctaatgtaaactaacaggcttcctacatgcacgctaaacatgtaatctacatatgcatactgttatactaatcttacctggattccgatttcaggtgtgccggtcaacctgactggaactgaagctgaacggcggattactggctcctaaaccataaaaatcacaacgctataagtgacacgctaaatcacttcccggggactaaaactcgaaactaaaagtttccctatcgataaaaagcatggcaatacccctaaaaacccaaaaacgaggaaaactagggttctgaaaaatccccaaccggaagaccggttgcccaaccggaattccggttctgggaaaatctgaacccccatccggaattccggatgctcaaccggaattccggttcctcgcaggcagcaaccaaaaatttccataactcgaccaatttaaccccaattgatcccaaactttccagacctgctctataggtcccaaataacaattctaaagcatcaaacctacccagaaatcacacaagcaaatttcaccattgaagaccaagctttgagttcaagaactcaaacttggttaaacccactagcatgcaccctagcctagttaattctacttaactaagcattaaaacacctctgcaaactaacaataacatccagcaataacacagaaactaaacaaagcatttttctcacaaaatcacctattttcacatataatttaaaagcttgaacaacctaactaatatgctttcaacacagctcatttaacatcaaaaatcatgctttgaataaacctaaatcaacaacaaaacacagcagaaacatctctcaaaaatcacatgcatttcatccattttcatcatttttctcaagcaatttaaagagaaagagttagaatttacataccacaacctagagttcacaactaggatgaatttagcttagagaattgaagaaaaacccagctttgcaccccaaagtacccagccgaaagtgaagaggaaaagagagagttttctttgaaaatttctattttttttctctaagtgttgaaaaatgaaagacttaaaatgaaaatgccatttaactaaactcatttcagctaacatttaataaaataaacacttatttttccatttaataaatcacataaaacaaaacactaatggggcaaaaagaccattttgcccctccaccataaaatcacataattcatactaaaggggtatttttgggacattctaaattcccggccattcccgacattcccaatgtctaaaacccatccccaaaatactaacatactaagttgtgatttatactgagccaaacgccgcgttccaaaataccgaacaccggaaatacgaaacataaaagctactgatgacataattatgcatatctgaattccataaataacaatgataaattatttaaatagctataaataatttcctgattaacataaataactgctaatttccaaattaactaagcgggctttacaactattccccccttaaaaggatttcgtccccgaaatctaacctgaacaactctggaaattgagctcgcatatctgattctagctcccaggtggcttcttccaccttactgcttctccagagaaccttgaccaatgctatggtcttattccgaaggactttatcctttctatccaggatctgcactggctgttcctcataagacatatctgactgaagctgaaggctctcataactgagtatatgagaggggtctgaaacgtattttctcaacattgagacatgaaatacgttgtgcactgctgataaagctggaggcaatgctaaccgatatgccacttgacctatcttctcgagaatctcgaaaggtcctgtaaatctagggcataacttgcctcttttcccgaaacgtttaatccccttcatcggagacactcgcaaaaacacatggtcccctactcggaactcaacatctctacgtttcggatctgcgtaactcttctgtctgctctgggaggcaagcattctagctttaattttctctattgcctcattggtccgctgaactgactctggacctaggtatttcctctcccctgtctcatcccagtggataggggacctacatttcctaccgtacaacagttcgtagggtgccatccctatcgtactctggtaactgttgttgtaagaaaattccactaacggtaggtatttactccatgaaccctcaaagtccataacacaggctctcagcatatcctccaatatctgaattgtcctttcggactgaccatctgtctgaggatggaatgctgtactgaattttagcttcgtacccattgcccgttgcaaactttgccaaaatttagaggtgaatttcggatccctgtccgaaactatagacttcggtaccccgtgaagtctcactatttccctgacgtataattctgccacctgatccactgtaaatgttgttctgaccggcagaaaatgagcagatttcgtaaatcggtccaccactacccagatggaatcatacatacccgtggtcctaggtaacccgaccacaaaatccatcgtaatatcctcccatttccactctggtagggttagaggctgcaacaaccctgctggtctctgatgttcagccttgatctgctgacacgtgaggcatctcgaaacgaattctaccaaattcttcttcataccgctccaccagaagtacggtttcaaatcttggtacatcttggtggtgccgggatgtagagaatatggagtagaatgagcctcctcaaagatctcgttcctcaagtccacactgttcgggacacaaaccctggctttatacaaaagcattccactagctgacactgaaaagtctttggcttgaccagccaatacctcatctcggatcttcactaactccggatctgtcgtctgagcaacctttattctttctaacagatcagattgcagcgttaagttgtgaagctgacctaccacaaactcaatgctggatctaaccatatcctctgctagctgaggtgagatctgaaccatgctagccacttgcccgggaccctttctgctcagggcatcggccactacattggctttcccgggatggtaaagaatctcacaatcatagtccttcactaattccaaccaacgtctttgtctcatgttcaaatctttctgagtaaagagatacttgagacttttatggtcggtatagatctcacacttctccccatacaagtaatgccgccaaatcttcagtgcaaaaaccactgcggccaattctaaatcatgagtcgggtatcgctgttcataatcctttaactgacgggaggcgtaagcgataacccgatcggcttgcatcaatacacaccccaaaccctgtttggatgcgtcacagtagaccacgaacttctcctcgtccgaaggcaaagctagtaccggtgcagtaatcaatctctgtttcagttcctgaaaactagcttcgcatttatctgtccagataaatcgctgattcttctttgtaagctcggttaggggcattgaaattttggagaacccctccacgaacctacggtaatacccagctaatcccaagaagcttctgatctctgtcactgtcttcggtctcggccaatccctgacggattcgatcttcccgggatccaccttgatcccgtccttacccacaatgtgtcctaggaaggacacctgagacaaccagaactcacatttcttgaacttggcgtagagtctatgttctcgaagtcgttgcagtaccatctgaagatgtaactcatgctcctcttctgactgagagtacacgaggatgtcgtcgataaacacaatcacacagatatcgaggaaatccttgaatactctattcatcaggtccatgaatgctgcaggagcgttggttagtccgaatgacataaccaggaactcgtagtgtccatacctagtgcggaaagccgtctttggaatgtcctcctctcggatcctcaactgatgataacccgaacggagatcaatcttagaaaagaccgtctttccctgaagctgatcgaacaagtcatcgatcctaggtaatggatatttattcttcaccgtcagcttgttcaactctctgtagtcgatgcacatcctcatagatccatccttcttcttcacgaacaaaaccggggctccccagggtgacacactgggccgaatgaaccctatgtcaagcaacccttggagctgaatctttaactccttaagttcagctggagccatcctatacggggctttagaaaccggatccacccctggtgccaagtcaatcacaaagtcaatctcccgttgaggtggtaaccctggaagttcttcgggaaaaacgtccaaaaattcccgaaccacactgatgtcctctggccgaatggtgtctggccgagtggtgtccaccaccacggccagaaaccctaagcacccaccgtgcaataattctctcgctgacatagccgagatcaccgggatccgagatccctgaaccgaacccacaaacacgaacggttcttcactttccggttggaagaccaccatcttcctcttgcaatcaatgctcgccgaatatttagataggaaatccattcctaaaataatatcaagttcgactaagctcatctctatcagatcagcgcttaactctctaccatctatcctgatcggcatagacctaatccacctattggagataaccaattctccgccaggtaacagggttccaaaccctgattcatatctatcaaagggtctacccaacttactaaagactctggccgccacataagaacgtgtagccccagaatcaaacagcactgaataaagcgagtcgttaataagaatctgacctgtaacaactgatgggctggcatctggatcagcctgcgtgatcgcgaataccctggctggagtgggtatcgctggagccctcggtgcctctgaccggagctggggacattccctcttgaagtgcccgggcatgccacaatgaaagcatccctgccctttgcactccccccgatggtgcctcttgcagctagggcactcgggataggagaagcgagtctcattaccaccaggacgactccctctgttctggttcccccggaacctcttgttctgactcgagccgccggaagcagtgggtgccctcttcctctgatcaatggtcgaaccactactccccctgctaaatcctgatgcatgaggggtaggagctccgccaccaaccggagtactggctgaatctgacatacaccccactgcgccctcagctcgcagtgccttctccaccatctgagcgtaggtggtgctgtcgtcagtggtaatcatcaggtcatgcctgatcttgggattcaacccgtccagatacttctcctttctgctgaagtcggttggcacaattcccgaggctaacctcgccaaccggtcaaactgagtagtatactcagtgacactcatgttctcccgctgggtcaggtgaacgaactctttcctcttggcgcttctaaccgcctcattgtagtacttcgcgttgaagagttcttggaacctctcccaagtcatggtggtgacatcgtgaatctgagacaccatgtcccaccataccagggcatcctcctggaactgaaatgtggcgcacaccactctgtcgttgccggtgacacccataaagttcagaattctggtgatcaccgtaagccactgctcggctttcgacacatctggacctcccaggaataccggaggtgcttgtttccggaacctctcatacaacggctccaatctatgggccgccactaccatctcggcctgggcagcaggggcaggtgccactggaactactggcactggaactgcaggagcaccctgctgtctcaacctctgaatctcgaggtcttgctcttcgatcctggcttgcatctccgcaaaccgtaactcccagttcggggctccctgatcggctgggggagcctgggcagcctgtggcgggttctcatcaccccgaccacgagccctgcctcggggacctctacctcggcccctagcaggtgggggaaaccgagctccctctccctgattcgaccccacggagttgcctcgactcctggtagtccgcctggcgtccatctagttagaaccgcctgcgaaaccaagagttggcatatcaggtcgtattcaaggcgagcttactaatgccgcttaattggaaattagaaatgaaacatgcgcctattctactatcaggctactaacatgcttcctaacaggcttttcttttttttttataactgaataaaataaactactaaagcaataaaggcttactgaaccgtgaaccgagctaactgctgatgatgattgtacatgtcgtgacgatcttcagaagacaacctggcggctctgataccaagttgtaacaccctaactaatttaggcgtattacgtgatttttaaacgtactgtgcagctcgttgctaatcaacgaggtttatggaaaaacgtgattaattaaaattttgctttttcattaaacttataaaccattttaccaaaaagtctcgggatcccgatttataaaaatatttacaaacgtttttactattcaacttttacatcaaaataaggtcatctaacgaccgttacaaaaatctcagccctgctgtcccgaggatcgtacgctccaggcctaaccgccccgacatgtacaatctcataagcccgctcacggtccatcagcaactgccttgcctttacctacacatgaacgtaaactgtgagtcgacagactcagtaagaaaagcatactaatatcatacataaaaactgactgccgtgtctaacacgatactgagtcccgctactgccatgtccaacatggtactgagcactactgccatgtccaacatggtactgagttttgaacgttcaggggacggtactattgacaaatatcctcctgatcggtcgaaccggtcatactccggctgctggtcatactccagcctgtaccgacgggataggtcaatagcactgaaccaccaaccagtgtcagcctgatcggtcgaaccggtcatactccggctgctggtcatactccagcctgtaccgacgtgacagggttgggtggttcgaagcctaaatacatatctaatgtaaactaacaggcttcctacatgcacgctaaacatgtaatctacatatgcatactgttatactaatcttacctggattccgatttcaggtgtgccggtcaacctgactggaactgaagctgaacggcggattactggctcctaaaccataaaaatcacaacgctataagtgacacgctaaatcacttcccggggactaaaactcgaaactaaaagtttccctatcgataaaaagcatggcaatacccctaaaaacccaaaaacgaggaaaactagggttctgaaaaatccccaaccggaagaccggttgcccaaccggaattccggttctgggaaaatctgaacccccatccggaattccggatgctcaaccggaattccggttcctcgcaggcagcaaccaaaaatttccataactcgaccaatttaaccccaattgatcccaaactttccagacctgctctataggtcccaaataacaattctaaagcatcaaacctacccagaaatcacacaagcaaatttcaccattgaagaccaagctttgagttcaagaactcaaacttggttaaacccactagcatgcaccctagcctagttaattctacttaactaagcattaaaacacctctgcaaactaacaataacatccagcaataacacagaaactaaacaaagcatttttctcacaaaatcacctattttcacatataatttaaaagcttgaacaacctaactaatatgctttcaacacagctcatttaacatcaaaaatcatgctttgaatcaacctaaatcaacaacaaaacacagcagaaacatctctcaaaaatcacatgcatttcatccattttcatcatttttctcaagcaatttaaagagaaagagttagaatttacataccacaacctagagttcacaactaggatgaatttagcttagagaattgaagaaaaacccagctttgcaccccaaagtacccagccgaaagtgaagaggaaaagagagagttttctttgaaaatttctattttttttctctaagtgttgaaaaatgaaagacttaaaatgaaaatgccatttaactaaactcatttcagctaacatttaataaaataaacacttatttttccatttaataaatcacataaaacaaaacactaatggggcaaaaagaccattttgcccctccaccataaaatcacataattcatactaaaggggtatttttgggacattctaaattcccggccattcccgacattcccaatgtctaaaacccatccccaaaatactaacatactaagttgtgatttctactgagccaaacgccgcgttccaaaataccggacaccggaaatacgaaacataaaagctactgatgacataattatgcatatctgaattccataaataacaatgataaattatttaaatagctataaataatttcctgattaacataaataactgctaatttccaaattaactaagcgggctttacaagtaataaatctttgtcatacttgtaagaaatgttttgccacttgttaactaacttcacaagctcatgtatctccttgatctttttaacactaaacatagtagact

SEQ ID NO: 151 - DNA, 1224 bp, Cannabis sp.
acataaactaatctcttgaaattatccttataatattttgaaccccaaacgcttgcttgttcgtaggtagcagagccattatagttgtttcttccaatgtcaaggtccctataattgagataagcttctcttggattcttagacacatatggagtcatgtaactataagcactttttgtccattccaagtaattctctgtatcagaatcattccccttctccacccacctagttagataagtgagttcataaaggtttccaactcgatgagggaatggagtttccgattccggaatctcgtccattcttcctccataaggaaacaactgaagaactgcagttcctaactctacttgatacaatctttttgctaacttttcaaaaacatcttttggaatttcctccttgacataatcagcttttgctttaaatgaaaacattactgattgtgtcctattaagtagaacatcaagagaagaattagttgggaatccattgaacaaaagtatggactgaatccaactcatttcagtacaatcttttcttgttaaacccaactcaggaaagcttttcttaactaaagaagaagcttatcaatttcaccaaggtacaccccaaaaaaggtagcttgtaatgatggtttattgatcatcccaggagttgtagaattcccagctagtatcctaacaaacagtaagaaatctttactaaatttgtcagcttttgtttgccactgatgaacaatcttcttggttgaatctagctcgtagtccatctgaacagtggctattgtcaatgaagatggcatatcaaccaacttgatcttccaagaaagaacaattccaaagctggctgctccaccacctcttaaagcccaaaataaattacctcccatatattttcgtcaactatttttccatttgctaaaagtatacgtacatctacaacattatcacctccaagaccatattttctcatcaaaattccatagccacctccactgaagtgtccaccaacacctacagtgtagcaaagcccagcaggaaatcctagtacaggacttttcttggcaatattgtaataaacttcaccgatggtagctccagcttcaacccatgcagtttttgtatcaacgtttactttcaccttacgaaggtttctcatatcgattacgatgtaaggaacatcggatatgtatgagaggccgtcggaatcatgtccgcc

SEQ ID NO: 152 - DNA, 1126 bp, Cannabis sp.
cttgttcgtaggtagcagagccattatagttgtttcttccaatgtcaaggtccctataattgagataagcttctcttggattcttagacacatatggagtcatgtaactataagcactttttgtccattccaagtaattctctgtatcagaatcattccccttctccacccacctagttagataagtgagttcataaaggtttccaactcgatgagggaatggagtttccgattccggaatctcgtccattcttcctccataaggaaacaactgaagaactgcagttcctaactctacttgatacaatctttttgctaacttttcaaaaacatcttttggaatttcctccttgacataatcagcttttgctttaaatgaaaacattactgattgtgtcctattaagtagaacatcaagagaagaattagttgggaatccattgaacaaaagtatggactgaatccaactcatttcagtacaatcttttcttgttaaacccaactcaggaaagcttttcttaactaaaggaagaagcttatcaatttcaccaaggtacaccccaaaaaaggtagcttgtaatgatggtttattgatcatcccaggagttgtagaattcccagctagtatcctaacaaacagtaagaaatctttactaaatttgtcagcttttgtttgccactgatgaacaatcttcttggttgaatctagctcgtagtccatctgaacagtggctattgtcaatgaagatggcatatcaaccaacttgatcttccaagaaagaacaattccaaagctggctgctccaccacctcttaaagcccaaaataaattacctcccatatattttcggtcaactatttttccatttgctaaaagtatacgtacatctacaacattatcacctccaagaccatattttctcatcaaaattccatagccacctccactgaagtgtccaccaacacctacagtgtagcaaagcccagcaggaaatcctagtacaggacttttcttggcaatattgtaataaacttcaccgatggtagctccagcttcaacccatgcagtttttgtatcaacgtttactttcaccttacgaaggtttctcatatcgattacgatgta

SEQ ID NO: 153 - DNA, 1545 bp, Cannabis sp.
tggtgattcgtgaagatcaatggttatccattattcttatggacttggcagtggtagtggaagaggtggaatgctctgttcattcctgaagaaattttggggatcaactttagtcttcacatgaactaacctcttgaaattgtctttcccgaaatactttctaccccaaatacttgcttgtgtgtaactcgtgggtcccttgtcgttatttttacccaagtcaagatctcgatagtttacatatgcacttcttgggcttttggacacataaggagtcatgtacttgtaaacacttctaggccaattgatactcccatcatcatcatcatcatctcctggtttctgaacccattgagcatagtagagaattttgtagaggtttccggctctatgggagaatggaatctctgattcagaaatctcattcattttcccaccataaggaaacaactgaaagaatcccactccaacatcttcttcatataacttttcaagcattgttttcaatacattttctggtatagttttcttcacgtagtcaagtttacctttgaatgaaaacaaccattgttgagttctattaagcaagttttccatctcagctccaatagggaatccagcaaaataagaaacagactcaatccagctcatttcattgcaatcttctcttttcaaaccaaactcaggaaaactcttttccattaatgaaagaagattatccactccaccaagaaacaatgacaagaattgagcttggagtataaccttattattttgggtagaattcacagtcgagaacctaattaagataaccaaatcatcatccaacttatcagcaatgtattgccacttgttcacaagcttcatggtctcattttggcccaaatccctattaacaatgaatgttgtcactgttgatgggacaggaaccaatctgattttccaagcgagaacgattccaaagcttgctgctccaccaccacgtatggcccaaaacaaatcctcccccattgattctcgatcaagaattttcccatcaacattaacaatgtaagcatcaatgatattatcagctgctaggccatattttcgcaccaaaggtccatagccacctccactaaagtgtccaccaacgcctaccgtagggcaaaatccagcaggaaagccgagatttcgacttttctcggcaatcctataataaacttcaccaatggtagctccggcttcaacccaagcagttttttcatccacgtttacgttgatagaacttaggtttctcaagtctattatgacaaatgggacttcagaaacgtaagagaggccttcgaaatcatggccaccgcttcgtgttcggatctctaacccatgtatctttgagcagtagacagaggcttggacatgggaggcgtttgaaggtgtaacgataacgagtggttttggagttgaagggaaggaaaatcttaggttttgtatgttggagctcattacagagataaacgacgagtcgtttcgagtgtatgtgagttcagccaaagtggttgtgtt

SEQ ID NO: 154 - DNA, 1271 bp, Cannabis sp.
gaagaaattttggggatcaactttagtcttcacatgaactaacctcttgaaattgtctttcccaaaatactttctaccccaaatacttgcttgtgtgtaactcgtgggtcccttgtcgttatttttacccaagtcaagatctctatagtttacatatgcacttcttgggcttttggacacataaggagtcatgtagttataaacacttctaggccaattgatactcccatcatcatctcctggtttttgaacccattgagcatagtagagaattttgtagaggtttccggctctatgggagaatggaatctctgattcagaaatctcattcattttcccaccataaggaaacaactgaaagaatcccactccaacatcttcttcatataacttttcaagcattgttttcaatacattctctggtatagttttcttcacgtagtcaagtttacctttgaatgaaaaaaccattgttgagttctattaagcaagttttccatctcagctccaatagggaatccagcaaaataagaaacagactcaatccagctcatttcattgcaatcttctcttttcaaaccaaactcaggaaaactcttttccattaatgaaagaagattatccactccaccaagaaacaatgacaagaattgagcttggagtataaccttattattttgggtagaattcacagtcgagaacctaattaagataaccaatcatcatccaacttatcagcaatgtattgccacttgttcacaagcttcatggtctcattttggcccaaatccctattaacaatgaatgttgtcactgttgatgggacaggaaccaatctgattttccaagcgagaacgattccaaagcttgctgctccaccacgtatggcccaaaacaaatcctccccattgattctcgatcaagaatttttccatcaacattaactatataagcatcaatgatattatcagctgctaggccatattttcgcaccaaaggaccatagccacctccactaaagtgtccaccaacgcctactgtagggcaaaatccagcaggaaagccgagatttcgacttttctcggcaatcctataataaacttcaccaatggtagctccggcttcaacccaagcagttttttcatccacgtttacgttgatagaacttaggtttctcaagtctattataacgaatgggacttcagaaacgtaagagagaccttcgaaatcatggccaccgcttcgtgttcggatctctaacccatgtatct

SEQ ID NO: 155 - DNA, 1536 bp, Cannabis sp.
acacaaccattttggctgaactcacatacactcgaaactactcgtcgtttatgtctgtaatgaactccaacatacaaaacctaaaattttcctttccttcaactccaaaaccactcgttatcgttacaccttcaaacgcctcccatgtccaagcctctgtctactgctcaaagatacatgggttagagatccgaacacgaagcggtggccatgatttcgaaggtctctcttacgtttctgaagtcccattcgttataatagacttgagaaacctaagttctatcaacgtaaacgtggatgaaaaaactgcttgggttgaagccggagctaccattggtgaagtttattataggattgccgagaaaagtcgaaatctcggctttcctgctggattttgccctacagtaggcgttggtggacactttagtggaggtggctatggtcctttggtgcgaaaatatggcctagcagctgataatatcattgatgcttatatagttaatgttgatggaaaaattcttgatcgagaatcaatgggggaggatttgttttgggccatacgtggtggtggagcagcaagctttggaatcgttctcgcttggaaaatcagattggttcctgtcccatcaacagtgacaacattcattgttaatagggatttgggccaaaatgagaccatgaagcttgtgaacaagtggcaatacattgctgataagttggatgatgatttggttatcttaattaggttctcgactgtgaattctacccaaaataataaggttatactccaagctcaattcttgtcattgtttcttggtggagtggataatcttctttcattaatggaaaagagttttcctgagtttggtttgaaaagagaagattgcaatgaaatgagctggattgagtctgtttcttattttgctggattccctattggagctgagatggaaaacttgcttaatagaactcaacaatggttattttcattcaaaggtaaacttgactacgtgaagaaaactataccagagaatgtattgaaaacaatgcttgaaaagttatatgaagaagatgttggagtgggattctttcagttgtttccttatggtgggaaaatgaatgagatttctgaatcagagattccattctcccatagagccggaaacctctacaaaattctctactatgctcaatgggttcaaaaaccaggagatgatgatgggagtatcaattggcctagaagtgtttataactacatgactccttatgtgtccaaaagcccaagaagtgcatatgtaaactatagagatcttgacttgggtaaaaataacgacaagggacccacgagttacacacaagcaagtatttggggtagaaagtattttgggaaagacaatttcaagaggttagttcatgtgaagactaaagttgatccccaaaatttcttcaggaatgaacagagcattccacctcttccactgccactgccaagtcaataagaataatggataagtaccattgatctttaccaaacta

SEQ ID NO: 156 - DNA, 1536 bp, Cannabis sp.; identical to SEQ ID NO: 155

SEQ ID NO: 157 - DNA, 1278 bp, Cannabis sp.
gaagaaattttggggatcaactttagtcttcacatgaactaacctcttgaaattgtctttcccaaaatactttctaccccaaatacttgcttgtgtgtaactcgtgggtcccttgtcgttatttttacccagtcaagatctctatagtttacatatgcacttcttgggcttttggacacataaggagtcatgtagttataaacacttctaggccaattgatactcccatcatcatctcctggtttttgaacccattgagcatagtagagaattttgtagaggtttccggctctatgggagaatggaatctctgattcagaaatctcattcattttcccaccataaggaaacaactgaaagaatcccactccaaacatcttcttcatataacttttcaagcattgttttcaatacattctctggtatagttttcttcacgtagtcaagtttacctttgaatgaaaataaccattgttgagttctattaagcaagttttccatctcagctccaatagggaatccagcaaaataagaaacagactcaatccagctcatttcattgcaatcttctcttttcaaaccaaactcaggaaaactcttttccattaatgaaagaagattatccactccaccaagaaacaatgacaagaattgagcttggagtataaccttattattttgggtagaattcacagtcgagaacctaattaagataaccaaatcatcatccaacttatcagcaatgtattgccacttgttcacaagcttcatggtctcattttggcccaaatccctattaacaatgaatgttgtcactgttgatgggacaggaaccaatctgattttccaagcgagaacgattccaaagcttgctgctccaccaccacgtatggcccaaaacaaatcctccccattgattctcgatcaagaattttttccatcaacattaactatataagcatcaatgatattatcagctgctaggccatattttcgcaccaaaggaccatagccacctccactaaagtgtccaccaacgcctactgtagggcaaaatccagcaggaaagccgagatttcgactttttctcggcaatcctataataaacttcaccaatggtagctccggcttcaacccaagcagttttttcatccacgtttacgttgatagaacttaggtttctcaagtctattataacgaatgggacttcagaaacgtaagagagaccttcgaatcatggccaccgcttcgtgttcggatctctaacccatgtatctt

SEQ ID NO: 158 - DNA, 1536 bp, Cannabis sp.
agtttggtaaagatcaatggtacttatccattattcttattgacttggcagtggcagtggaagaggtggaatgctctgttcattcctgaagaaattttggggatcaactttagtcttcacatgaactaacctcttgaaattgtctttcccaaaatactttctaccccaaatacttgcttgtgtgtaactcgtgggtcccttgtcgttatttttacccaagtcaagatctctatagtttacatatgcacttcttgggcttttggacacataaggagtcatgtagttataaacacttctaggccaattgatactcccatcatcatctcctggtttttgaacccattgagcatagtagagaattttgtagaggtttccggctctatgggagaatggaatctctgattcagaaatctcattcattttcccaccataaggaaacaactgaaagaatcccactccaacatcttcttcatataacttttcaagcattgttttcaatacattctctggtatagttttcttcacgtagtcaagtttacctttgaatgaaaataaccattgttgagttctattaagcaagttttccatctcagctccaatagggaatccagcaaaataagaaacagactcaatccaactcatttcattgcaatcttctcttttcaaaccaaactcaggaaaactcttttccattaatgaaagaagattatccactccaccaagaaacaatgacaagaattgggcttggagtataaccttattattttgagtagaattcacagtcgagaacctaattaagataaccaaatcatcatccaacttgtcagcaatgtattgccacttgttcacaagcttcatggtctcattttggcccaaatccctattaacaatgaatgttgtcactgttgatgggacaggaaccaatctgattttccaagcgagaacgattccaaagcttgctgctccaccaccacgtatggcccaaaacaaatcctcccccattgattctcgatcaagaattttcccatcaacattaacaatgtaagcatcaatgatattatcagctgctaggccatattttcgcaccaaaggtccatagccacctccactaaagtgtccaccaacgcctaccgtagggcaaaatccagcaggaaagccgagatttcgacttttctcggcaatcctataataaacttcaccaatggtagctccggcttcaacccaagcagttttttcatccacgtttacgttgatagaacttaggtttctcaagtctattatgacaaatgggacttcagaaacgtaagagaggccttcgaaatcatggccaccgcttcgtgttcggatctctaacccatgtatctttgagcagtagacagaggcttggacatgggaggcgtttgaaggtgtaacgataacgagtggttttggagttgaagggaaggaaaatcttaggttttgtatgttggagctcattacagagataaacgacgagtcgtttcgagtgtatgtgagttcagccaaagtggttgtgtt

SEQ ID NO: 159 - DNA, 1814 bp, Cannabis sp.
ctcacccattcatttaaaataatttagttttgtttacctttcccacaaataatgctatatataagaaaaaggtctaaactcatgttaattgcaagaaaaatgaagtactcaacattctctttttggtttctttgcaaaatattagtttcacttctctcattctctatccaaacttctcgagctaatccacatgaaaagtttcttcaatgcttctccaaacatatcaacaacaataacaatacatcaattgtaaaactcatacacactccaaatgatccatcatatatctctgtcctaaattcaactatacaaaaccttagattcgcttctccttcaacaccaaaaccactagttatcatcacaccttcaaatacatctcatgtccaagcctgtgttttatgctccaagaaatatggcttgcagattcgaactcgaagcggcggccatgactttgagggtgcctcctatgtgtctaaagtcccatttgtgatattagatatgagaaatctacgttcaatcactgtagacgtagataccaaaactgcatgggttgaagctggagctaccattggtgaactttattataggattgctgagaaaaatgggaatctgagttttcctgctgggtactgtcgtactgttggggtaggtgggcatttcagtggaggaggctatggagcactgttgcgaaaatatggccttgcagctgataatatcattgatgttcacttagtcaacgcagatggagaattcgttgaccgaaaatccatgggagaagatttgttttgggctatacgtggtggtggtggagcaagctttggaatcattctcgcttggaaaatcagattggttgcagttccatcaaaagttactatgttctctgttagtaaaaacttggagatgaatgagactgtgaagatatataacaaatggcaaaatattgcttacaagtttgacaaagatttgttactctttgttagcttcatgactattaattctaccgattcacaagggaaatacaagacaactatacaagcttcattctcttctatatttcttggtagggttgagagtctcctcacattgatgcaaaagagatttcctgagttgggaattgaaagaaaagattgcctcgaaaagagctggattgaaactgtcgtttactttgatggtttttcaagtggggatacaccagaatctttacttaatacaacatttcaacaaaatgtatttttcaaggtgaaattagactatgtaaagaagccagttccagaatttgtgatggtaaaacttttggagaagttatatgaagaagatgtaggtgtggggtttcttatgatgtacccttatggtggtaaaatggatgagatttcagaatcagcaattccattccctcatcgagctggatttatgtacaaaattttgtacttgtctgcatgggagaaagaaggagaaagtgaaaagcatatgaattgggtccgaagtgcatataatttcatgtctccttatgtgtctcaaaatccaagagctacatatctcaattatagggaccttgatttgggaacaaataacgagaagggtcctattagttactcacaagcaagtgtttggggtaaaaagtatttcggtatgaactttaagaggttagttaatgtgaaaaccaaggtcgatccaagtaatttctttaaaaacgaacaaagcatcccaccacttctgtcgcgacgcctctaaatatttgtactgatataatataataatgaaaaattctacaattcacctttttaaaagggatgcatgtatcttatctattttga

SEQ ID NO: 160 - DNA, 1384 bp, Cannabis sp.
aatggaattgctgattctgaaatctcatccattttaccaccataagggtacatcataagaaaccccactcctacatcttcttcatataacttctccaaaagttttaccatcacaacttctggaactggcttcttcacatagtctaatttcaccttgaaaaatacattttgttgaaatgttgtattaagtaaagattctggtgtatccccacttgaaaaaccatcaaagtaaacgacagtttcaatccagctcttttcgaggcaatcttttctttcaattcccaactcaggaaatttcttttgcatcaatatgaggagactctcaaccctaccaagaaatatagaagagaatgaagcttgtatagttgtcttgtatttcccttgtgaatcggtagaattaatagtcatgaagctaacaaagagtaacaaatctttgtcaaacttgtaagcagtattttgccatttgttatatatcttcacagtctcattcatctccaagtttttactaacagagaacatagtaactttagatggaactgcaaccaatctgattttccaagcgagaatgattccaaagcttgctccaccaccaccacgtatggcccaaaacaaatcttctcccatagattttcggtcaaggaattctccatctgcgttgactaagtgagcatcaatgatattatcagctgcaaggccatattttcgcaacagtgctccatagcctcctccactgaaatgcccacctaccccaacagtacgacagtacccagcaggaaaactcagattcccatttttctcagcaatcctataataaagttcaccaatggtagctccagcttcaacccatgcagttttggtatctacgtctacagtgattgaacgtagatttctcatatctaatatcacaaatgggactttagacacataggaggcaccctcaaagtcatggccaccgcttcgagttcgaatctgcaagccatatttcttggagcataaaacacaggcttggacatgggatgtatttgaaggtgtgatgataactagtggttttggtgttgatggagaagcgaatctaaggttttgtatagttgaatttaggacagagatatatgatggatcatttggagtgtgtatgacttttacaattgatttattgttattgttgttgatatgtttggagaagcattgaagaaagttgtcatgtggattagctcgagaagtttggatagagaatgagagaagtgaaactaatattttgcaaagaaaccaaaaagagaatgttgagtacttcattttttttgcaattaacatgagtttagacctttcttatatatagcattatatgtggaaaaggtaaacaaaactaaatttaaaataaatgggtg

SEQ ID NO: 161 - DNA, 6735 bp, Cannabis sp.
caaaatatagataagatacatgcatcccttttaaaaaggtgaattgtagaatttttcattattattatatcagtataaatatttagaggcgtcgcgacagaagtggtgggatgctttgttcgtttctaaagaaattacttggatcgaccttggttttcacattaactaacctcttaaagttcataccaaaatactttttaccccaaaccttgcttgtgagtactaataggacccttctcgttatttgttcccaaatcaaggtccctataattgagatatgtagctcttggattttgggacacataaggagacatgaaattatatgcacttcggacccaattcatatgcttttcactttctccttctttctcccatgcagacaagtacaaaattttgtacataaatccagctcgatgagggaatggaattgctgattctgaaatctcatccattttaccaccataagggtacatcataagaaaccccactcctacatcttcttcatataacttctccaaaagttttaccatcacaacttctggaactggcttctttacatagtctaatttcaccttgaaaaatacattttgttgaaatgttgtattaagtaaagattctggtgtatccccacttgaaaaaccatcgaagtaaacgacagtttcaatccagctcttttcgaggcaatcttttctttcaattcccaactcaggaaatttcttttgcatcaatgtgaggagactctcaaccctaccaagaaatagaagagaatgaagcttgtatagttgtcttgtatttcccttgtgaatcggtagaattaatagtcatgaagctaacaaagagtaacaaatctttgtcaaacttgtaagcagtattttgccatttgttatatatcttcacagtctcattcatctctaagtttttactaacagagaacatagtaacttttgatggaactgcaaccaatctgattttccaagcgagaatgattccaaagcttgctccaccaccaccacgtatggcccaaaacaaatcttctcccatagattttcggtcaacgaattctccatctgcgttgactaagtgagcatcaatgatatttgatgaaaagtgctacacatttctacacttttcttctctagaaaattctagtattaactacaaaactaagaaattagagaaaactagaattacctagaaactatatttgtaagctaagaaacttagaaaattctagaatatcttagaaagttaaattgtaatttaaaataagaaaaatctagaaagttgtagtatcatccttagctccctataaataccaagcttgggttgaggagctagtgtaacaaaataaccaacaccaaaaaaaccaaagttccaaactatcaataaaagtttactactttctcaaacaaccctctcttctaagccaaactacttttatactaaatctacaactactcatcaacatcactacttcactacattaccacaacaaaccattaaccactatccacctattccaaatctaaaccaatacaaatttattatcaaaccatcagtggtatcagagctccgttcgatcatatatcactgggcgtaatcttttccactcatcaacatgagttcggagtacaatcgctcttcactacctcttccaattttccatggagaaaatatgatttttggtccatcaaaatgaggacctattttcgatcacaaaatctatggaaaattgttgaagaaggaatcactattccggaagatattacatctctttcggaagatcaaaagaaggcactcgaggataatcaacaaaaggattctcatgcattatatgcttgcaacaagctatggcgacaatctttttccacgaatatgagcgcagcaacgcaaaagaagcatgggacacgctgcaggaggagttccaaggaacagtcaaggtacgcacagttagactacaaaagcttagaagagattttgagaatcttagaatgaaagataatgagactgcaaaagattactattctagaattaaagaaatagtaaatcaaatgggagcctatggagaaataatttctgacaagaatatagtacaaaagatactaatttcttgtacagaaaaatatgattcaatagtttctgtgatagaggaaactaaagatttagaaactctatcaccaactgaactaatgggctctcttgaagcatatgaaagtagacgagaaaggcataaggaaagtgaagtagaaaatgcctttcagtctaaaatcaattcgcggtctcaaaaaccaaaagctgatgggaaaaagacacaagaaaaacaaaaagaaaataacgacaagtatcctccatgtggcatttgtaaaagaaaaagtcacttggagaaagactgctggtttaaaggaaaaccacagtgccaaaattgtaaaaaatttggccacactgaaaaaacttgtcgtttaaagaaatcccatcaagctaatttttccgaagagaaaaatgatgaaaataatctcttctatgtctgccaagctgcaacagagaagaaaagatacttggtatcttgacagtggttgcagtaaccacatgacgaaaaatgaaagcatcttttgtagtcttgatagatccaagactaaagtcaaaatcggtaatggtgacttcatggaagcagtcggcaaaggcaccattgccattgacactaaaaaaggcaagagatacatcaatgatgtactcttgtacccaacattgatcaaaacctacttagcgtaggtcaaatgattgaaaaagggtactctttgcattttgaaggagattcttgcacaatctatgataagcaagataaatcctttcaaattgcaaaggtaaaaatgaaagaaaatagatgctttcccatacaatggagatatgcaagcaatgtggcaatgcaagcgcaaacagatgagtcatggctatggcatagaaggtttggtcacttcaacttccatgggcttaagatcctcaagcagaagaatatgatgcgagacctcccagcaattaaggagatcaacacagtctgtgaaggatgcatgctcgggaaacaacatcgacaaccttttccatctggcaaagcttggagagccaaaaagccactggagctagtccatactgacgtctgcggggcaatgcgcactccatcaaatgaccaaaacaggtacttcattctcttcattgatgactttactagaatgacatgggtttattttatgcaacaaaagtcgcaagtcttcgatattttcaaaaagttcaaatcccgtgtcgaaagacaaagcggtcactacatcaagacaattagaagtgatagaggcaaagaatacacttctaatgaattcaacaagttctgtgaagatgaagggatggagcaccaactcactgttggatacgcaccagaacagaatggtgtatctgaaaggaaaaacaggactgttatggaggcagcaagagccatgctgctagagaaaggtctcccaaaacgattttgggcagaggcagtaagcactgcagtctacttgctcaaccgatgtccaaccaaagccgtgcagaataagacgccgatcgaagcttggagcggacgtaagccatcagcaaagcatctcaaagtcttcggctgcatatgctacagtcacattccaaaagagaaaagaggcaagcttgatgagaaggcagagaaaggaatcttcttaggctatagtactcaatcaaaaggttatcgagtctatagcttagaaacaaataagctaataatcagtcgagacgtaaaatttgacgaagatgctgcatacaactgggagacacaagaagttgaaagaaagacagtcaatattcctctaccgccaagacaagaaactgatcaaaatgaagttcttactcaaccaagaacacaagaacctgcacaagtcatagaatctccgccagactcaccagtaaggcgaacaagaccactatcagaaatctacgagacatgcaacttagtacttatggagccagaaagctttgaagcagctcataaacaagaagtatggagaaaagctatgaatgaagagataaagatgattatgaagaatgagacttgggagcttgtagatcgtccacaagacaaagatactataggagtcaagtgggtctacaagacaaagctcaacgcagatggctctatccaaaagcacaaagcaagattagttgcgaaaggatactcacaacaatacggagtcgactacaacgaaacatttgctccagttgcacgcctcgacactattagggctttaatagctctagccgcacaaagaaatggaagatttttcaactcgatgtgaagtcagcattcctaaatggttatcttgaagaagaaatttatgtggagcaacctcaagggttcgtggtacaaggacaggaagataaagtcctcaaattgaaaaaggctttatatggcctaaagcaagctccacgagcctggtatagcagaattgacaactactttaccgagcaaggattcaggaggagcaagagtgagccaactctttacatcaaaactcaaggtacgaatgatacactaattgtctctttatacgttgatgatctcatctacacaggcaataatgagaagatgataaagaagtttaaagaagacatgatgaaaaattttgagatgaccgacctgggattaatgcactactttctcgggatcgaaataactcaaaaagaagatgggatcttcatctcacaaaagaagtatacagagacactattgaagaaattcaaaatggagggatgcaagactgtatcaactccattagacaataacaaagctctcaagaaggaagatggctcaccgaaagctgatgaatcaaaatttcgaagtctaattggcagccttctatatctaactgctacaagaccagacataatgtacgcagttagtctcctatcaagattcatgcatgatccaagtcaagttcactacggagcagccaagcgaatcctcagatacttgcaaggaacaaaattctatggaatatggtacggagttacaagtgactcaaaacttgttggctacacagatagtgactgggcaggatccatggacgacatgaagagcacgtcaggatatgccttcacacttggatcaggaatattttcatgggcatcaaagaagcaagcaactgttgcacaatcatcagctgaagcagagtatattgcagcagcaatgactacaagccaagctatatggctcaaaagaatacttgaagacatgtgagaattacaaaagaagctacaaagatatattgcgatagcaaatcagctatagcaatggcgaaaaatccagtatttcatagtagaactaaacatataagcatcaagtaccatttcatcagggaagcagaagcaaaaaagaaatcgagctcaaacactgcaagactgaagagcaggtagccgacatattcacaaaggcactaccaagaggaaagttcgagctattgcgagacatgatcggagttaccgaaatgtgtaccaaggaggagtgatgaaaagtgctacacatttctacacttttcttctctagaaaattctagtattaactacacaaaactaagaaaattagagaaaactagaattacctagaaactatatttgtaagctaagaaacttagaaaattctagaatatcttagaaagttaaattgtaatttaaaataagaaaaatctagaaagttgtagtatcatccttagctccctataaataccaagcttgggttgaggagctagtgtaacaaaaaccaacaccaaaaaaccaaagttccaaactatcaataaaagtttactactttctcaaacaaccctctcttctaagccaaactacttttatatactaaatctacaactactcatcaacatcactacttcactacattaccacaacaaaccattaaccacatatccacctattccaaatctaaaccaatacaaatttattatcaaaccatcaatattatcagctgcaaggccatattttcgcaacagtgctccatagcctcctccactgaaatgcccacctaccccaacagtacgacagtatccagcaggaaaactcagattcccatttttctcagcaatcctataataaagttcaccaatggtagctccagcttcaacccatgcagttttggtatctacgtctacagtgattgaacgtagatttctcatatctaatatcacaaatgggactttagacacataggaggcaccctcaaagtcatggccgccgcttcgagttcgaatctgcaagccatatttcttggagcataaaacacaggcttggacatgggatgtatttgaaggtgtgatgataattagtggttttggtgttgaaggagaagcgaatctaaggttttgtatagttgaatttaggacagagatatatgatggatcatttggagtgtgtatgagttttacaattgatgtattgttattgttgttgatatgtttggagaagcattgaagaaagttttcatgtggattagcttgagaagtttggatagagaatgagagaagtgaaactaatattttgcaaagaaaccaaaaagagaatgttgagtacttcatttttcttgcaattaacatgagtttagacctttcttatatatagcattaattgtagaaaaagtatacaaaactaaattttaaataaatgggtaaggaagga

SEQ ID NO: 162 - DNA, 1611 bp, Cannabis sp.
acatgaagaaacaaaccgtacgtataaatattacaatacaacagtattaatattggtaaattataacatatgcattacttagagaagtcgtggaaatgaaggtggaatgctctgttcgttcctaaagaaattagtcgggtcaaccttggttttcacttgaactaattcttaaaatttttattgaagtactttttcccccaaatgcttgcttgttcataacttataggacctttttcattatttgttcccaaatctaggtctctataattaatatatgaagctcttggatttttggacacgtatggagtcatgtaattataaacacttcgaacccaattcatatgcctttcactttcttcttctttttcccactgagaccaatataaaattttgtacataactccagctcgatgtgggaatggaattgcagattcaggaatctcgctcattttaccaccataagggtacatttgaatatatgccaatcctacatcttcttcatataacctttccaaaagtttgaccataacaatttctgaaattggcttcctaacgtagtctagtttccccttgaaataaccctttactacatttgttggatcgagcaaaacctccaatttatcttcacttgagaattcattgaagaaaaagatcatttcaatccaactcgtttcaaaacaatcttttcttactacacccaactcaggaaagttagtttgcatcaaggaaaggaaattatccactctaccaagaaaaatagaaaagaatgtagcttgtattgttgtcatattcttcccatgctcatcagtagaattcacagttaagaacctaactaccattaacaaatcttggtcaaacttgtgagcaatattttgccacttattataaattttcacagtttcatttatcggcaagttcttactaactgataatacagtaaccttagatggcacaggaaccaatctaattttccaagcaagaacaattccaaagcttgctccaccaccaccacgaatggcccaaaacaaatcttctcccattgattttcggtcaacgaattctccatcagcgttgactaagtgagcatcaatgacattatcagctgcaaggccatattttcgcatcaatgctccatagcctcctccactgaaatgcccaccaaccccaacactatggcaatagccaccaggaaaactaagattctcatttttctcagcgatcctataataaagttctccaagggtagctccagattcaacccatgcagttttgttatctacgtctacagtgattgaacgtagatttctcatatctaatatcacaaatgggactttagacacataggagacaccctcaaagtcatggccgccgcttcgagttcgaatctgtaagccatatttcttggaacataaaacacaggcttggacatgggatgtatttgaaggtgtgatgataactagtggttttggtgttggagaagtgaatctaaggttctgtatggttgaatttagaagggagataaatgaagagtcattggagtgtgtatgagtttggcaagtgatgtattgttgttggagatatgttggagaagcattgaagaaagttgttgtg

SEQ ID NO: 163 - DNA, 6806 bp, Cannabis sp.
aacaactttcttcaatgcttctccaaacatatctccaacaacaatacatcacttgccaaactcatacacactccaaatgactcttcatttatctcccttctaaattcaaccatacagaaccttagattcacttctccaacaccaaaaccactagttatcatcacaccttcaaatacatcccatgtccaagcctgtgttttatgttccaagaaatatggcttacagattcgaactcgaagcggcggccatgactttgagggtgtctcctatgtgtctaaagtcccatttgtgatattagatatgagaaatctacgttcaatcatgttaaggctcatgacagttatgacagttaaacctttgactgttcattctgttattgagttagttagctactgtgagtgttagttttctgttatgagggttgttactcattcggttattctgttttggcttagtctcagatctgttgagcttagctttgtatataaggctggattgtaattctgttcaatgagattaatctttcttctccattctttcctttctttcttctctgttctttctctttcataaatctttgttctgcattttctttcatcttgttctatgattctgttctgcaatgaatcctagatttaacatggtatcagagcgttggcctccgctcaatgttaacatggctactctcggatctactggtggtggcaactcgaacaacacatctggtttcaatggtggtcaagcagctcagcctcgaatcccaactcatcaagaaactgtatattttaatcacagcatttcaattcggttgaatgatcataatttccttttgtggaagcaacaggttttagctgcaatcaaaggcaatcgtttgctgaagttcatcaaagatccaccaccagctgagttccaaactccagaagatcgagtgcaaaacagggtgaatcaagccttcatcgactgggagatccaagatcaactcctagtctcatggctgctatcttcgatgacagagagtcttttgactcgaatggtgggatgcgattcagcacagcaaatctggtccacactggagaagcattttacattgcaagtgtcctcgaaaattcttgagtttcgtacgaaattgcagaatttaaagaaaggtaatctcagtcttaatgactatctcctgaaggttaaacaatctgtggatctccttgcttctgtgggagaagtcttgagcgatcgtgatcatgtggctgcgatcttcaaaggccttccaagcgaatacgataccttcgtcatttccacaaacaccagaactgaacaatacacagtcggagaaatcgaggcactgctcctagcttctgagtccagaattgaaaaatctggaaaggaattcgatgtgagtgcaaacctggtcactggtgatcaagatcaacagttagacaccttgatggaggcaaatcttgcctggagaaggttcagacagcagtatgggagaggaaattctcaggtttataacaactcaggtcagttcaatcaacctgtgtttagaagctttaatcgtggagatagttctggtgtgaaaggtaatttctccaattttcctccctatcaagctaacagaactggtacaaacctgaataataaggttcaatgtcaattatgcttgcgttttggacacactgcacacgactgtttttatcgttttgacaagtccttctcaggaactaaaccaggtgcaagcaatcaggtcactgtaccacagaaacctcaagctaatctgaccaccaacaacagttctactgattctagttggtatccagactcgggagctacaaaccattgtactcctcaagctcaaaacctggctgtttgctatgattatgaagggacagaccaaatgcatgtgggagatggtacaggtttgtcaataaagcatattggtcattcattttttactcctcagcatgcatctcattctcttgttcttaataacttacttcatgtccctgaaattacaaaaaatctcatgagtgtttctaaatttgccaaagataataatgtgtattttgaatttcatgatgatttttgttgtgtcaaggacaaagtgagcaatattaccttgctgatgggaatccacaagaatggcctatatacttttgacaagtctcaacttggtccaatccattcagctcccacctctagaatcaaatttcaagacttgcagcagccaagtcatagtcaaaccagcagcccacccattcatgaaagcactttatctcaaccaaattccaagtgtacttttgtggcaacacttaataactcatctgttactgtatctaactgctataagtgtaacacaaatgtacaaaacaattttaccttgtggcataataggcttggtcacccctctgaaaaagtggtccaaactgtactcaaatcttgtaacatttccaatgttaataaagattctgaattttctatttgctcagcttgttgtcttggtaaaattcataaatttccttttccaaaagcatctcaaactgttatttctgaaccacttcagcttgtggtttcagatctttggggaccatcatttgttccatcctttaatgggtacaaatattatattcattttgttgatgcttactctaggttcacctggctgtatcttcttaagaacaagtcagatgctctcaaaaccttccaacacttcaaagctgaagctgagttacaactcggcaagtctattaaaactctccaaactgattggggaggtgagtacaggtctttcacttcatttcttgctgattgtggcattcatcatagacatccttgtcctacaactcatcaacaaaatggccttgctgaaagaaagcataggcacattgttgaaaatggtcttgctcttcttgcacaagcctcattacctctaaaattttgggatgaagcctttaggacagctgtctatttatataacagacttcccacccccttgctgcatcaatgttctcctttggaaacattgtttcacaccaaacccgattacactacctttagaacctttggatgcaaatgttatcccaacattcgaccttacaacaaacacaaattagagtttaggtctaccccttgcacatttttgggatatagtttaaatcacaaaggttacaagtgtcttgactcgaaaggtagattgtatatctctcgtgatgttatttttgatgaattctcttttccttatgaccaaattcacaatcagcaaaatcatacacctgatcctatcatcccatcacatgtttctgctgttatacctgtgtgctgtcattttaaaactcctttttctgcaacagatttagttgcaccagcagaaactgatactgcttctgcatctgtatctcttgctccatctgatgctgctgttgagttgaataatgttccaactcccactcacaatgaccaacatgctttatttgatactgccattccatctaacctttttgttggacagtttcctactaacagcaggtgtgcagatcagtgtccgagtgctgatacaggtggcttttcaggattgtctccatgttcttcgaatgctggttctgatagtgttacacacactgatcaaccttcctcaacctcccctcgagtaccaatcataccagattccagaactgctcctgtttactcatctcctgctgcattaccattagttgctggctgtgttaatgctccagggaaacacaacatgcacaggatgcaaaccaggtcaaaaatgggtgtttttaaacccaaagtgtacctggcttctagagaaccaacttctctcaaggaagctcttcaacaagaacaatggaacaatgctatgagtgatgaaatacttgccttagccagaaatagaacttgggttcttgttagacttcctgaagggagacaagcaataggctgcaaatgggtgtataaaatcaaggagaatcctgatgggagtgtgctcaaaaacaaggctagacttgtggctaaaggttttcaccaacaagcaggctttgactttacagagacttttagtcctgtggttaaacctgtcactattagggtggttttgactctagccttgtctaatggttggaaaattagacaactagatgtcaataatgcttttctaaatggtgatttacaagaggaggtttatatgactcagccccccggttttgaaatcccaggtcaagaacagcttgtgtgcaaactcaataaggccatatatggtcttaagcaagcacctcgggcttggtttgacaaattacaacagagtttgacatcctttgggtttactccttcaaagtctgatcactccttgttcattaatcactcacctacatcaacaacacttgttcttgtgtatgttgatgatattttaataacagggagtgaccaaactgttgttaacactcttgttgcagatctgaatactcggttttctcttaaagatcttggcaaacttcgatattttcttggtatagaagttgagcataccgattcaggacttcatctttgtcaaaagaagtatgcacaagacttacttgtcagggctcaaatgtttggttccaagtcttctccaacacctatgacaagtggtcttcggttgtctgcacatgaaggagagcctcttgctgatgttcagcagtatagatccattgttggtgcgttgcaatatctcaccattactcgacccgaactctcctttagtgtgaacaaggtgtgccagtttatgcaaaagccattgtccactcattggcaagctgtcaagcgcattctgaggtacattagtggcacaatgcattatggtctcaccttttccaaacctgaatctcatgatcttgttgccttttgtgatgccgattgggcttcggatcctgatgacagaaagtccacctcggggtatgccatcttttttggttcgaatctcattgcttggaagagcaaaaagcaacaaaccatttctcggtctagtactgaaggcgagtatcgaagtgttgcaaatgtcactgctgaattgacctggctgcactatttgttttcagaacttcacattcacatgcctcagcctcctacaatatggtgtgacaacctcagcacgattatgctcacacaaaatccagttttacatgctcgcactaagcatatagaattggatctatattttgtcagagaaaaggtgttgaacaagatggttcaaatcaaacatgtggctgctcttgaccagattgcagatggtctcaccaaagccatttctagtcaaaggttctctggttttagagacaaactcagaattactgatcatcccattctgagtttgaggggcggtgttaaggctcatgacagttatgacagttaaacctttgactgttcattctgttattgagttagttagctactgtgagtgttagttttctgttatgagggttgttactcattcggttattctgttttggcttagtctcagatctgttgagcttagctttgtatataaggctggattgtaattctgttcaatgagattaatctttcttctccattctttcctttctttcttctctgttctttctctttcataaatctttgttctgcattttctttcatcttgttctatgattctgttctgcaatgaatcctagatttaacaaatcactatagacgtagataacaaaactgcatgggttgaatctggagctacccttggagaactttattataggatcgctgagaaaaatgagaatcttagttttcctggtggctattgccatagtgttggggttggtgggcatttcagtggaggaggctacggagcattgatgcgaaaatatggccttgcagctgataatgtcattgatgctcacttagtcaacgctgatggagaattcgttgaccgaaaatctatgggagaagatttgttttgggccattcgtggtggtggtggagcaagctttggaattgttcttgcttggaaaattagattggttcctgtgccatctaaggttactgtattatcagttagtaagaacttgccgataaatgaaactgtgaaaatttataataagtggcaaaatattgctcacaagtttgaccaagatttgttaatggtagttaggttcttaactgtgaattctactgatgagcatgggaagaatatgacaacaatacaagctacattcttttctatttttcttggtagagtggataagtttctttccttgatgcaaactaactttcctgagttgggtgtagtaagtaaagattgttttgaaacgagttggattgaaatgatctttttcttcaatgaattctcaagtgaagataaattggaggttttgctcgatccaacaaatgtagtaaagggttattttaaggggaaactagactacgttaggaagccaatttcagaaatcgttatggtcaaacttttggaaaagttatatgaagaagatgtaggattggcatatattcaaatgtacccttatggtggtaaaatgagcgagattcctgaatctgcaattccattcccacatcgagctggagttatgtacaaaattttatattggtctcagtgggaaaaagaagaagaaagtgaaaggcatatgaattgggttcgaagtgtttataattacatgactccatacgtgtccaaaaatccaagagcttcatatattaattatagagacctcgatttgggaacaaataatgaaaaaggtcctataagttatgaacaagcaagcatttgggggaaaaagtacttcaataaaaattttaagaaattagttcaa

SEQ ID NO: 164 - DNA, 1430 bp, Cannabis sp.
aacaactttcttcaatgcttctccaaacatatctccaacaacaatacatcacttgccaaactcatacacactccaaatgactcttcatttatctcccttctaaattcaaccatacagaaccttagattcacttctccaacaccaaaaccactagttatcatcacaccttcaaatacatcccatgtccaagcctgtgttttatgttccaagaaatatggcttacagattcgaactcgaagcggcggccatgactttgagggtgtctcctatgtgtctaaagtcccatttgtgatattagatatgagaaatctacgttcaatcattatagacgtagataacaaaactgcatgggttgaatctggagctaccttgggagaactttattataggattgctgagaaaaatgagaatcttagttttcctggtggctattgccatagtgttggggttggtgggcatttcagtggaggaggctacggagcattgatgcgaaaatatggccttgcagctgataatgtcattgatgctcacttagtcaacgctgatggaaaattcgttgaccgaaaatctatgggagaagatttgttttgggccattcgtggtggtggtggagcaagctttggaattgttctcgcttggaaaattagattggttcctgtgccatcgaaggttactatattatcagttagtaagaacttgccgataaatgaaactgtgaaaatttataataagtggcaaaatattgctcacaagtttgaccaagatttgttaatggtagttaggttcttaactgtgaattctactgatgagcatgggaagaatatgacaacaatacaagctacattcttttctatttttcttggtagagtggataagtttctttccttgatgcaaactaactttcctgagttgggtgtagtaagtaaagattgttttgaaacgagttggattgaaatgatcttttacttcaatgaattctcaagtgaagataaattggaggttttgctcgatccaacaaatgtagtaaagggttattttaaggggaaactagactacgttaggaagccaatttcagaaattgttatggtcaaacttttggaaaagttatatgaagaagatgtaggattggcatatattcaaatgtacccttatggtggtaaaatgagcgagattcctgaatctgcaattccattcccacatcgagctggagttatgtacaaaatttatatattggtctcagtgggaaaaagaagaagaaagtgaaaggcatatgaattgggttcgaagtgtttataattacatgactccatacgtgtccaaaaatccaagagcttcatatattaattatagagacctagatttgggaacaaataatgaaaaaggtcctataagttatgaacaagcaagcatttgggggaaaaagtacttca

SEQ ID NO: 165 - DNA, 867 bp, Cannabis sp.
ctaccaagaaaaatagaaaagaatgtagcttgtattgttgtcatattcttcccatgctcatcagtagaattcacagttaagaacctaactaccattaacaaatcttggtcaaacttgtgagcaatattttgccacttattataaattttcacagtttcatttatcggcaagttcttactaactgataatatagtaaccttcgatggcacaggaaccaatctaattttccaagcgagaacaattccaaagcttgctccaccaccaccacgaatggcccaaaacaaatcttctcccatagattttcggtcaacgaattttccatcagcgttgactaagtgagcatcaatgacattatcagctgcaaggccatattttcgcatcaatgctccgtagcctcctccactgaaatgcccaccaaccccaacactatggcaatagccaccaggaaaactaagattctcatttttctcagcaatcctataataaagttctcccaaggtagctccagattcaacccatgcagttttgttatctacgtctataatgattgaacgtagatttctcatatctaatatcacaaatgggactttagacacataggagacaccctcaaagtcatggccgccgcttcgagttcgaatctgtaagccatatttcttggaacataaaacacaggcttggacatgggatgtatttgaaggtgtgatgataactagtggttttggtgttggagaagtgaatctaaggttctgtatggttgaatttagaagggagataaatgaagagtcatttggagtgtgtatgagtttggcaagtgatgtattgttgttggagatatgtttggagaagcattgaagaaagttgttg

SEQ ID NO: 166 - DNA, 1388 bp, Cannabis sp.
gaagtactttttcccccaaatgcttgcttgttcataacttataggacctttttcattatttgttcccaaatctaggtctctataattaatatatgaagctcttggattttcggacacgtatggagtcatgtaattataaacacttcgaacccaattcatatgcctttcactttcttcttctttttcccactgagaccaatataaaattttgtacataactccagctctatgtgggaatggaattgcagattcaggaatctcgctcattttaccaccataaggtacatttgaatatatgccaatcctacatcttcttcatataacttttccaaaagtttgaccataacaatttctgaaattggcttcctaacgtagtctagtttccccttaaataaccctttactacatttgttggatcgagcaaaacctccaatttatctcacttgagaattcattgaagtaaaagatcatttcaatccaactcgtttcaaaacaatctttacttactacacccaactcaggaaagttagtttgcatcaaggaaagaaacttatccactctaccaagaaaaatagaaaagaatgtagcttgtattgttgtcatattcttcccatgctcatcagtagaattcacagttaagaacctaactaccatcaacaaatcttggtcaaacttgtgagcaatattttgccacttattataaattttcacagtttcatttatcggcaagttcttactaactgataatacagtaaccttagatggcacaggaaccaatctaattttccaagcagaacaattccaaagcttgctccaccaccaccacgaatggcccaaaacaaatcttctcccatagattttcggtcaacgaatttccatcagcgttgactaagtgagcatcaatgacattatcagctgcaaggccatattttcgcatcaatgctccgtagcctcctccactgaaatgcccaccaaccccaacactatggcaatagccaccaggaaaactaagattctcatttttctcagcaatcctataataaagttctccaagggtagctccagattcaacccatgcagttttgttatctacgtctacagtgattgaacgtagatttctcatatctaatatcacaaatgggactttagacacataggagacaccctcaaagtcatggccgccgcttcgagttcgaatctgtaagccatatttcttggaacataaaacacaggcttggacatgggatgtatttgaaggtgtgatgataactagtggttttggtgttgtgaagtgaatctaaggttctgtatggttgaatttagaagggagatatatgaaagtcatttggagtgtgtatgagtttggcaagtgatgtattgttgttgga

SEQ ID NO: 167 - DNA, 1551 bp, Cannabis sp.
tcatacacactccaaatgactcttcatttatctcccttctaaattcaaccatacaaaaccttagattcacttctccaacaccaaaacccctagtcatcatcacaccttcaaatacatcccatgtccaagcgtgtgttttatgttccaagaaatatggcttacagattcgaactcgaagcggcggccatgactttgagggtgtctcctttgtgtctaaagtcccatttgtgatattagatatgagaaatctacgttcaatcactatagacgtagataacaaaactgcatgggttgaatctggagctacccttggagaactttattataggattgctgagaaaaatgagaatcttagttttcctggtggctattgccatagtgttggggttggtgggcatttcagtggaggaggctatggagcgttgatgcgaaaatatggccttgcagctgataatgtcattgatgctcacttagtcaacgctgatggagaattcgttgaccgaaaatctatgggagaagatttgttttgggccattcgtggtggtggtggagcaagctttggaattgttctcgcttggaaaattagattggttcctgtgccatctaaggttactgtattatcagttagtaagaacttgccgataaatgaaactgttaaaatatataataagtggcaaaatattgctcacaagtttgaccaagatttgttaatggtagttaggttcttaactgtgaattctactgatgagcatgggaagaatatgacaacaatacaagctacattcttttctatttttcttggtagagtggataagtttctttccttgatgcaaactaactttcctgagttgggtgtagtaagaaaagattgttttgaaacgagttggattgaaatgatctttttcttcaatgaattctcaagtgaagataaattggaggttttgctcgatccaacaaatgtagtaaagggttatttcaaggggaaactagactacgttaggaagccaatttcagaaattgttatggtcaaacttttggaaaagttatatgaagaagatgtaggattggcatatattcaaatgtacccttatggtggtaaaatgagcgagattcctgaatctgcaattccattcccacatagagctggagttatgtacaaaattttatattggtctcagtgggaaaaagaagaagaaagtgaaaggcatatgaattgggttcgaagtgtttataattacatgactccatacgtgtccgaaaatccaagagcttcatatattaattatagagacctagatttgggaacaaataatgaaaaaggtcctataagttatgaacaagcaagcatttgggggaaaaagtacttcaataaaaattttaagaaattagttcaagtgaaaaccaaggttgacccgactaatttctttaggaacgaacagagcattccacctttatctccacgatttctctaaatacatatatatatgttataatttactattaattaatgttgtattgtattgtaatatttatacgtacggtttgtttctt

SEQ ID NO: 168 - DNA, 1836 bp, Cannabis sp.
aagaaagacaatttattttattacatatatcttatgatagtctacacagttgtaatgtagattttcatacttgggagcatacatagtatgggtagataattaatgatgacgcggtggaagaggtgggatactttgttcgtttctaaaaaaattattgggatcagctttggttttcaccttaactaacctgttaaaatttttaccaaaatacttttcaccccaaatacgtgcttgtgtgtaattattaggactctcaggattagtttttcctaaatcaaggtccctataattgagatacgccaatcttggattttgggacacataaggagttgtgaaattataaacacttcgaacccagtttatatgcttttcgttatcttcttgcttctcccaggtagcagtgtaccaaagttcatacattattccagctcgatgagggaatggaattgctgattctgaaatctcatccattataccaccgtaagggtacaacacatacatcccaactcctacctcttcttcatataatttttccaaaattttgaccattgcagtttcaggtattagtttcttaacatagtctaacttaattgagaaagccgtcttcttcccagctgatctatcaagcaaaatttcctttttaaaattagcagtgttgtaatttacaacaccactgtagaagatggttgtatcaatccagctcaattctttgcaatcagtttttttaatacccaactcaggaaagctcttgttcatcaagtcaactagactatccactccaccaagaaaaatggaagagaagtaaccatgtactgtagtcttattcttcccatgattatctgtaatattcctagttctgaagtgagtcgtgagcattaaatctttgtcatacttgtaagcaatattttgccatttgttaaataacttgacaagcccatgtatctccatgttctttttaacactgaatatagtagcctttgatgggacaacaacaagtttgattttccatgctgcaatgattccaaagttttctcctcctccaccacgtatagcccaaaatagatcttctcccatggattttcgatctagaacttttccatcaacattgactaagtgtgcatcaatgatattatcagccgcaaggccataatttcgcatcaatgctccatagcctcctccactaaagtgtccacctacgccaacagtagggcaatacccaccaggaaaactaaaattctcattcatctcattgatccaataataaacttctccaagggtagctccggcttcaacccacgcagtttggctatgaatatctactttgaccgtatgcatgtttctcaagtctactatagcaaatgggacttgagatatgtaggacaaaccctcagcatcatggccaccgcttcgagttcgaatctgcaaaccaactttcttggagcagagaatactggcctggatatgggagacatttgaaggagtgacaataacgagtggttttggggttgtatcagaggtgaatctaagattttgtattgtcgaattcaggacagacatatacaattggtcgtgttgagtgtatatgaattttggatttgctggattgttaggaatatattccgagaagcatttaaggaagttttcttgaggattagctattgaaatttggatattgaatgagagaaagaaaaatattattttgcaaaaaaccaaaaggagaatgttgagcaattcatttttcttcagtcctaatgatattttgaattattatgaatagagaactatcctatttataatattatatattggagttggggcaaatgaattgacataaat

SEQ ID NO: 169 - DNA, 1836 bp, Cannabis sp.
tttatgtcaattcatttgccccaactccaatatataatattataaataggatagttctctattcataataattcaaaatatcattaggactgaagaaaaatgaattgctcaacattctccttttggttttttgcaaaataatatttttctttctctcattcaatatccaaatttcaatagctaatcctcaagaaaacttccttaaatgcttctcggaatatattcctaacaatccagcaaatccaaaattcatatacactcaacacgaccaattgtatatgtctgtcctgaattcgacaatacaaaatcttagattcacctctgatacaaccccaaaaccactcgttattgtcactccttcaaatgtctcccatatccaggccagtattctctgctccaagaaagttggtttgcagattcgaactcgaagcggtggccatgatgctgagggtttgtcctacatatctcaagtcccatttgctatagtagacttgagaaacatgcatacggtcaaagtagatattcatagccaaactgcgtgggttgaagccggagctacccttggagaagtttattattggatcaatgagatgaatgagaattttagttttcctggtgggtattgccctactgttggcgtaggtggacactttagtggaggaggctatggagcattgatgcgaaattatggccttgcggctgataatatcattgatgcacacttagtcaatgttgatggaaaagttctagatcgaaaatccatgggagaagatctattttgggctatacgtggtggaggaggagaaaactttggaatcattgcagcatggaaaatcaaacttgttgttgtcccatcaaaggctactatattcagtgttaaaaagaacatggagatacatgggcttgtcaagttatttaacaaatggcaaaatattgcttacaagtatgacaaagatttaatgctcacgactcacttcagaactaggaatattacagataatcatgggaagaataagactacagtacatggttacttctcttccatttttcttggtggagtggatagtctagttgacttgatgaacaagagctttcctgagttgggtattaaaaaaactgattgcaaagaattgagctggattgatacaaccatcttctacagtggtgttgtaaattacaacactgctaattttaaaaaggaaattttgcttgatagatcagctgggaagaagacggctttctcaattaagttagactatgttaagaaactaatacctgaaactgcaatggtcaaaattttggaaaaattatatgaagaagaggtaggagttgggatgtatgtgttgtacccttacggtggtataatggatgagatttcagaatcagcaattccattccctcatcgagctggaataatgtatgaactttggtacactgctacctgggagaagcaagaagataacgaaaagcatataaactgggttcgaagtgtttataatttcacaactccttatgtgtcccaaaatccaagattggcgtatctcaattatagggaccttgatttaggaaaaactaatcctgagagtcctaataattacacacaagcacgtatttggggtgaaaagtattttggtaaaaattttaacaggttagttaaggtgaaaaccaaagctgatcccaataatttttttagaaacgaacaaagtatcccacctcttccaccgcgtcatcattaattatctacccatactatgtatgctcccaagtatgaaaatctacattacaactgtgtagactatcataagatatatgtaataaaataaattgtctttctta

SEQ ID NO: 170 - DNA, 1836 bp, Cannabis sp.
aagaaagacaatttattttattacatatatcttatgatagtctacacagttgtaatgtagattttcatacttgggagcatacatagtatgggtagataattaatgatgacgcggtggaagaggtgggatactttgttcgtttctaaaaaaattattgggatcagctttggttttcaccttaactaacctgttaaaatttttaccaaaatacttttcaccccaaatacgtgcttgtgtgtaattattaggactctcaggattagtttttcctaaatcaaggtccctataattgagatacgccaatcttggattttgggacacataaggagttgtgaaattataaacacttcgaacccagtttatatgcttttcgttatcttcttgcttctcccaggtagcagtgtaccaaagttcatacattattccagctcgatgagggaatggaattgctgattctgaaatctcatccattataccaccgtaagggtacaacacatacatcccaactcctacctcttcttcatataatttttccaaaattttgaccattacagtttcaggtattagtttcttaacatagtctaacttaattgagaaagccgtcttcttcccagctgatctatcaagcaaaatttcctttttaaaattagcagtgttgtaatttacaacaccactgtagaagatggttgtatcaatccagctcaattctttgcaatcagtttttttaatacccaactcaggaaagctcttgttcatcaagtcaactagactatccactccaccaagaaaaatggaagagaagtaaccatgtactgtagtcttattcttcccatgattatctgtaatattcctagtttctgaagtgagtcgtgagcattaaatctttgtcatacttgtaagcaatattttgccatttgttaaataacttgacaagcccatgtatctccatgttctttttaacactgaatatagtagcctttgatgggacaacaacaagtttgattttccatgctgcaatgattccaaagttttctcctcctccaccacgtatagcccaaaatagatcttctccatggattttcgatctagaacttttccatcaacattgactaagtgtgcatcaatgatattatcagccgcaaggccataatttcgcatcaatgctccatagcctcctccactaaagtgtccacctacgccaacagtagggcaatacccaccaggaaaactaaaattctcattcatctcattgatccaataataaacttctccaagggtagctccggcttcaacccacgcagtttggctatgaatatctactttgaccgtatgcatgttttcaagtctactatagcaaatgggacttgagatatgtaggacaaaccctcagcatcatggccaccgcttcgagttcgaatctgcaaaccaactttcttggagcagagaatactggcctggatatgggagacatttgaaggagtgacaataacgagtggttttggggttgtatcagaggtgaatctaagattttgtattgtcgaattcaggacagacatatacaattggtcgtgttgagtgtatatgaattttggatttgctggattgttaggaatatattccgagaagcatttaaggaagttttcttgaggattagctattgaaatttggatattgaatgagagaaagaaaaatattattttgcaaacaaaccaaaaggagaatgttgagcaattcatttttcttcagtcctaatgatattttgaattattatgaatagagaactatcctatttataatattatatattggagttggggcaaatgaattgacataaat

SEQ ID NO: 171 - DNA, 1837 bp, Cannabis sp.
aagaaagacaatttattttattacatatatcttatgatagtctacacagttgtaatgtagattttcatacttgggagcatacatagtatgggtagataattaatgatgacgcggtggaagaggtgggatactttgttcgtttctaaaaaaattattgggatcagctttggttttcaccttaactaacctgttaaaatttttaccaaaatacttttcaccccaaatacgtgcttgtgtgtaattattaggactctcaggattagtttttcctaaatcaaggtccctataattgagatacgccaatcttggattttgggacacataaggagttgtgaaattataaacacttcgaacccagtttatatgcttttcgttatcttcttgcttctcccaggtagcagtgtaccaaagttcatacattattccagctcgatgagggaatggaattgctgattctgaaatctcatccattataccaccgtaagggtacaacacatacatcccaactcctacctcttcttcatataatttttccaaaattttgaccattgcagtttcaggtattagtttcttaacatagtctaacttaattgagaaagccgtcttcttcccagctgatctatcaagcaaaatttcctttttaaaattagcagtgttgtaatttacaacaccactgtagaagatggttgtatcaatccagctcaattctttgcaatcagtttttttaatacccaactcaggaaagctcttgttcatcaagtcaactagactatccactccaccaagaaaaatggaagagaagtaaccatgtactgtagtcttattcttcccatgattatctgtaatattcctagttctgaagtgagtcgtgagcattaaatctttgtcatacttgtaagcaatattttgccatttgttaaataacttgacaagcccatgtatctccatgttctttttaacactgaatatagtagcctttgatgggacaacaacaagtttgattttccatgctgcaatgattccaaagttttctcctcctccaccacgtatagcccaaaatagatcttctcccatggattttcgatctagaacttttccatcaacattgactaagtgtgcatcaatgatattatcagcagcaaggccataatttcgcatcaatgctccatagcctcctccactaaagtgtccacctacgccaacagtagggcaatacccaccaggaaaactaaaattctcattcatctcattgatccaataataaacttctccaagggtagctccggcttcaacccacgcagtttggctatgaatatctactttgaccgtatgcatgtttctcaagtctactatagcaaatgggacttgagatatgtaggacaaaccctcagcatcatggccaccgcttcgagttcgaatctgcaaaccaactttcttggagcagagaatactggcctggatatgggagacatttgaaggagtgacaataacgagtggttttggggttgtatcagaggtgaatctaagattttgtattgtcgaattcaggacagacatatacaattggtcgtgttgagtgtatatgaattttggatttgctggattgttaggaatatattccgagaagcatttaaggaagttttcttgaggattagctattgaaatttggatattgaatgagagaaagaaaaatattattttgcaaacaaaccaaaaggagaatgttgagcaattcatttttcttcagtcctaatgatattttgaattattatgaatagagaactatcctatttataatattatatattggagttggggcaaatgaattgacataaat

SEQ ID NO: 172 - DNA, 1831 bp, Cannabis sp.
aagaaagacaatttattttattacatatatcttatgatagtctacacagttgtaatgtagattttcatacttgggagcatacatagtatgggtagataattaatgatgacgcggtggaagaggtgggatactttgttcgtttctaaaaaaattattgggatcagctttggttttcaccttaactaacctgttaaaattttaccaaaatacttttcaccccaaatacgtgcttgtgtgtaattattaggactctcaggattagtttttcctaaatcaaggtccctataattgagatacgccaatcttggattttgggacacataaggagttgtgaaattataaacacttcgaacccagtttatatgcttttcgttatcttcttgcttctcccaggtagcagtgtaccaaagttcatacattattccagctcgatgagggaatggaattgctgattctgaaatctcatccattataccaccgtaagggtacacacatacatcccaactcctacctcttcttcatataatttttccaaaattttgaccattgcagtttcaggtattagtttcttaacatagtctaacttattgagaaagccgtcttcttcccagctgatctatcaagcaaaatttcctttttaaaattagcagtgttgtaatttacaacaccactgtagaagatggttgtatcaatccagctcaattctttgcaatcagtttttttaatacccaactcaggaaagctcttgttcatcaagtcaactagactatccactccaccaagaaaaatggaagagaagtaaccatgtactgtagtcttattcttcccatgattatctgtaatattcctagttctgaagtgagtcgtgagcattaaatctttgtcatacttgtaagcaatattttgccatttgttaaataacttgacaagcccatgtatctccatgttctttttaacactgaatatagtagcctttgatgggacaacaacaagtttgatttccatgctgcaatgattccaaagttttctcctcctccaccacgtatagcccaaaatagatcttctcccatggattttcgatctagaacttttccatcaacattgactagtgtgcatcaatgatattatcagcagcaaggccataatttcgcatcaatgctccatagcctcctccactaaagtgtccacctacgccaacagtaggcaatacccaccaggaaaactaaaattctcattcatctcattgatccaataataaacttctccaatggtagctccggcttgaacccacgcagtttggctatgaatatctactttgaccgtatgcatgtttctcaagtctactatagcaaatgggacttgagatatgtaggacaaaccctcagcatcatggccaccgcttcgagttcgaatctgcaaaccaactttcttggagcagagaatactggcctggatatgggagacatttgaaggagtgacaataacgagtggttttggggttgtatcagaggtgaatctaagattttgtattgtcgaattcaggacagacatatacaattggtcgtgttgagtgtatatgaattttggatttgctggattgttaggaatatattccgagaagcatttaaggaagttttcttgaggattagctattgaaatttggatattgaatgagagaaagaaaaatattattttgcaaacaaaccaaaaggagaatgttgagcaattcattttcttcagtcctaatgatattttgaattattatgaatagagaactatcctatttataatattatatattggagttggggcaatgaattgacataaatat

SEQ ID NO: 173 - DNA, 1635 bp, Cannabis sativa
atgaattgctcagcattttccttttggtttgtttgcaaaataatatttttctttctctcattccatatccaaatttcaatagctaatcctcgagaaaacttccttaaatgcttctcaaaacatattcccaacaatgtagcaaatccaaaactcgtatacactcaacacgaccaattgtatatgtctatcctgaattcgacaatacaaaatcttagattcatctctgatacaaccccaaaaccactcgttattgtcactccttcaaataactcccatatccaagcaactattttatgctctaagaaagttggcttgcagattcgaactcgaagcggtggccatgatgctgagggtatgtcctacatatctcaagtcccatttgttgtagtagacttgagaaacatgcattcgatcaaaatagatgttcatagccaaactgcgtgggttgaagccggagctacccttggagaagtttattattggatcaatgagaagaatgagaatcttagttttcctggtgggtattgccctactgttggcgtaggtggacactttagtggaggaggctatggagcattgatgcgaaattatggccttgcggctgataatattattgatgcacacttagtcaatgttgatggaaaagttctagatcgaaaatccatgggagaagatctgttttgggctatacgtggtggtggaggagaaaactttggaatcattgcagcatggaaaatcaaactggttgctgtcccatcaaagtctactatattcagtgttaaaaagaacatggagatacatgggcttgtcaagttatttaacaaatggcaaaatattgcttacaagtatgacaaagatttagtactcatgactcacttcataacaaagaatattacagataatcatgggaagaataagactacagtacatggttacttctcttcaatttttcatggtggagtggatagtctagtcgacttgatgaacaagagctttcctgagttgggtattaaaaaaactgattgcaaagaatttagctggattgatacaaccatcttctacagtggtgttgtaaattttaacactgctaattttaaaaaggaaattttgcttgatagatcagctgggaagaagacggctttctcaattaagttagactatgttaagaaaccaattccagaaactgcaatggtcaaaattttggaaaaattatatgaagaagatgtaggagctgggatgtatgtgttgtacccttacggtggtataatggaggagatttcagaatcagcaattccattccctcatcgagctggaataatgtatgaactttggtacactgcttcctgggagaagcaagaagataatgaaaagcatataaactgggttcgaagtgtttataattttacgactccttatgtgtcccaaaatccaagattggcgtatctcaattatagggaccttgatttaggaaaaactaatcatgcgagtcctaataattacacacaagcacgtatttggggtgaaaagtattttggtaaaaattttaacaggttagttaaggtgaaaactaaagttgatcccaataatttttttagaaacgaacaaagtatcccacctcttccaccgcatcatcat

SEQ ID NO: 174 - DNA, 1635 bp, Cannabis sativa
atgaagtgctcaacattctccttttggtttgtttgcaagataatatttttctttttctcattcaatatccaaacttccattgctaatcctcgagaaaacttccttaaatgcttctcgcaatatattcccaataatgcaacaaatctaaaactcgtatacactcaaaacaacccattgtatatgtctgtcctaaattcgacaatacacaatcttagattcacctctgacacaaccccaaaaccacttgttatcgtcactccttcacatgtctctcatatccaaggcactattctatgctccaagaaagttggcttgcagattcgaactcgaagtggtggtcatgattctgagggcatgtcctacatatctcaagtcccatttgttatagtagacttgagaaacatgcgttcaatcaaaatagatgttcatagccaaactgcatgggttgaagccggagctacccttggagaagtttattattgggttaatgagaaaaatgagaatcttagtttggcggctgggtattgccctactgtttgcgcaggtggacactttggtggaggaggctatggaccattgatgagaaactatggcctcgcggctgataatatcattgatgcacacttagtcaacgttcatggaaaagtgctagatcgaaaatctatgggggaagatctcttttgggctttacgtggtggtggagcagaaagcttcggaatcattgtagcatggaaaattagactggttgctgtcccaaagtctactatgtttagtgttaaaaagatcatggagatacatgagcttgtcaagttagttaacaaatggcaaaatattgcttacaagtatgacaaagatttattactcatgactcacttcataactaggaacattacagataatcaagggaagaataagacagcaatacacacttacttctcttcagttttccttggtggagtggatagtctagtcgacttgatgaacaagagttttcctgagttgggtattaaaaaaacggattgcagacaattgagctggattgatactatcatcttctatagtggtgttgtaaattacgacactgataattttaacaaggaaattttgcttgatagatccgctgggcagaacggtgctttcaagattaagttagactacgttaagaaaccaattccagaatctgtatttgtccaaattttggaaaaattatatgaagaagatataggagctgggatgtatgcgttgtacccttacggtggtataatggatgagatttcagaatcagcaattccattccctcatcgagctggaatcttgtatgagttatggtacatatgtagttgggagaagcaagaagataacgaaaagcatctaaactggattagaaatatttataacttcatgactccttatgtgtccaaaaatccaagattggcatatctcaattatagagaccttgatataggaataaatgatcccaagaatccaaataattacacacaagcacgtatttggggtgagaagtattttggtaaaaattttgacaggctagtaaaagtgaaaaccctggttgatcccaataacttttttagaaacgaacaaagcatcccacctcttccacggcatcgtcattaa

SEQ ID NO: 175 - DNA, 56 bp, Artificial sequence
  Single strand DNA oligonucleotide
ggggacaagtttgtacaaaaaagcaggctatgaattgctcagcattttccttttgg

SEQ ID NO: 176 - DNA, 52 bp, Artificial sequence
  Single strand DNA oligonucleotide
ggggaccactttgtacaagaaagctgggtatgatgatgcggtggaagaggtg

SEQ ID NO: 177 - DNA, 52 bp, Artificial sequence
  Single strand DNA oligonucleotide
ggggacaagtttgtacaaaaaagcaggctatgaagtgctcaacattctcctt

SEQ ID NO: 178 - DNA, 49 bp, Artificial sequence
  Single strand DNA oligonucleotide
ggggaccactttgtacaagaaagctgggttaatgacgatgccgtggaag

1. (canceled)

2. A method of producing cannabinoids in a plant, the method comprising modulating expression in the plant of at least one polypeptide comprising an amino acid sequence at least 95% identical to SEQ ID NO: 1-15 and 18-86 said polypeptide modulating cannabinoid synthesis, thereby producing cannabinoids in the cell.

3. A method of selecting a plant for a cannabinoid profile, the method comprising analyzing in the plant or part thereof presence of a nucleic acid sequence at least 95% identical to SEQ ID NO: 91-180 or amino acid sequence at least 95% identical to SEQ ID NO: 1-15 and 18-86, wherein presence or absence of said nucleic acid sequence or amino acid sequence is indicative of the cannabinoid profile.

4. The method of claim 3, further comprising determining a cannabinoid or cannabinoid profile of the plant or part thereof.

5. The method of claim 2, further comprising recovering the cannabinoids from the plant or cell.

6. The method of claim 5, wherein said recovering is by extraction and/or fractionation.

7-8. (canceled)

9. A cell, a plant, or part thereof having being genetically modified to down-regulate expression of a polypeptide comprising an amino acid sequence at least 95% identical to SEQ ID NO: 1-15 and 18-86.

10. The cell, plant or part thereof of claim 9, being a transgenic plant or plant cell.

11. The cell, plant or part thereof of claim 9, being a non-transgenic plant or plant cell.

12. The method of claim 3, wherein said modulating is by genome editing.

13. The method of claim 3, wherein said modulating is by transgenesis.

14. The method of claim 3, wherein said modulating is by breeding.

15. The method of claim 2, wherein said modulating comprises upregulating expression.

16. The method of claim 2, wherein said modulating comprises downregulating expression.

17. The cell of claim 9, wherein the cell is yeast.

18. (canceled)

19. The cell of claim 9, wherein the cell is a plant cell.

20. The cell or plant or part thereof of claim 9, wherein the plant part is a flower.

21. The cell or plant or part thereof of claim 9, wherein the plant part is a seed.

22. The cell or plant or part thereof of claim 9, wherein the plant part is a root.
